(19) United States
(12) Patent Application Publication
(10) Pub. No.: US 2023/0131847 A1
(43) Pub. Date: Apr. 27, 2023

(54) RECOMBINASE COMPOSITIONS AND METHODS OF USE

(71) Applicant: FLAGSHIP PIONEERING INNOVATIONS VI, LLC, Cambridge, MA (US)

(72) Inventors: Jacob Rosenblum RUBENS, Cambridge, MA (US); Robert James CITORIK, Somerville, MA (US); Stephen Hoyt CLEAVER, Boston, MA (US); Cecilia Giovanna Silvia COTTA-RAMUSINO, Cambridge, MA (US); Yanfang FU, Arlington, MA (US)

(21) Appl. No.: 17/749,788

(22) Filed: May 20, 2022

Related U.S. Application Data
(63) Continuation of application No. PCT/US2020/061705, filed on Nov. 22, 2020.
(60) Provisional application No. 62/939,525, filed on Nov. 22, 2019.
(60) Provisional application No. 63/039,309, filed on Jun. 15, 2020.
(60) Provisional application No. 63/068,402, filed on Aug. 21, 2020.

(51) Int. Cl. C12N 15/86; C12N 9/12; C12N 9/14

(52) U.S. Cl. CPC C12N 15/86; C12N 9/1241; C12N 9/14; C12Y 306/04; C12N 2750/14143; C12N 2830/46; C12N 2830/38

(57) ABSTRACT

Methods and compositions for modulating a target genome are disclosed.

### RELATED APPLICATIONS

[0001] This application is a continuation of International Application PCT/US2020/061705, filed Nov. 22, 2020, which claims priority to U.S. Ser. No. 62/939,525 filed Nov. 22, 2019, U.S. Ser. No. 63/039,309 filed Jun. 15, 2020, and U.S. Ser. No. 63/068,402 filed Aug. 21, 2020, the entire contents of each of which is incorporated herein by reference.

### SEQUENCE LISTING

[0002] The instant application contains a Sequence Listing which has been submitted electronically in ASCII format and is hereby incorporated by reference in its entirety. Said ASCII copy, created on Jan. 7, 2021, is named V2065-7004WO_SL.txt and is 5,902,721 bytes in size.

### SUMMARY OF THE INVENTION

[0003] This disclosure relates to novel compositions, systems and methods for altering a genome at one or more locations in a host cell, tissue or subject, in vivo or in vitro. In particular, the invention features compositions, systems and methods for the introduction of exogenous genetic elements into a host genome using a recombinase polypeptide (e.g., a serine recombinase, e.g., as described herein).

### Enumerated Embodiments

[0004] 1. A system for modifying DNA comprising:

[0005] a) a recombinase polypeptide comprising an amino acid sequence of Table 3A, 3B, or 3C, or an amino acid sequence having at least 70%, 75%, 80%, 85%, 90%, 95%, 96%, 97%, 98%, or 99% identity thereto, or a nucleic acid encoding the recombinase polypeptide; and

[0006] b) a double-stranded insert DNA comprising:
[0007] (i) a DNA recognition sequence that binds to the recombinase polypeptide of (a),
   [0008] said DNA recognition sequence having a first parapalindromic sequence and a second parapalindromic sequence, wherein each parapalindromic sequence is about 15-35 or 20-30 nucleotides, and the first and second parapalindromic sequences together comprise a parapalindromic region occurring within a nucleotide sequence in the LeftRegion or RightRegion columns of Table 2A, 2B, or 2C, or a nucleotide sequence having at least 70%, 75%, 80%, 85%, 90%, 95%, 96%, 97%, 98%, or 99% identity to said parapalindromic region, or having no more than 1, 2, 3, 4, 5, 6, 7, 8, 9, 10, 11, 12, 13, 14, 15, 16, 17, 18, 19, or 20 sequence alterations (e.g., substitutions, insertions, or deletions) relative thereto, and
   [0009] said DNA recognition sequence further comprises a core sequence of about 2-20 nucleotides wherein the core sequence is situated between the first and second parapalindromic sequences, and
[0010] (ii) a heterologous object sequence.
   2. A system for modifying DNA comprising:

[0011] a) a recombinase polypeptide comprising an amino acid sequence of Table 3A, 3B, or 3C, or an amino acid sequence having at least 70%, 75%, 80%, 85%, 90%, 95%, 96%, 97%, 98%, or 99% identity thereto, or a nucleic acid encoding the recombinase polypeptide; and

[0012] b) an insert DNA comprising:
[0013] (i) a human first parapalindromic sequence and a human second parapalindromic sequence that bind to the recombinase polypeptide of (a), wherein each parapalindromic sequence is about 15-35 or 20-30 nucleotides, and the first and second parapalindromic sequences together comprise a parapalindromic region occurring within a nucleotide sequence in the LeftRegion or RightRegion columns of Table 2A, 2B, or 2C, or a nucleotide sequence having at least 70%, 75%, 80%, 85%, 90%, 95%, 96%, 97%, 98%, or 99% identity to said parapalindromic region, or having no more than 1, 2, 3, 4, 5, 6, 7, 8, 9, 10, 11, 12, 13, 14, 15, 16, 17, 18, 19, or 20 sequence alterations (e.g., substitutions, insertions, or deletions) relative thereto, and
[0014] said DNA recognition sequence further comprises a core sequence of about 2-20 nucleotides wherein the core sequence is situated between the first and second parapalindromic sequences, and
[0015] (ii) optionally, a heterologous object sequence.
   2a. A system for modifying DNA comprising:

[0016] a) a recombinase polypeptide comprising an amino acid sequence of Table 3A, 3B, or 3C, or an amino acid sequence having at least 70%, 75%, 80%, 85%, 90%, 95%, 96%, 97%, 98%, or 99% identity thereto, or a nucleic acid encoding the recombinase polypeptide; and

[0017] b) a double-stranded insert DNA comprising:
[0018] (i) a DNA recognition sequence that binds to the recombinase polypeptide of (a), wherein optionally the DNA recognition sequence comprises about 30-70 or 40-60 nucleotides of sequence occurring within a nucleotide sequence in the LeftRegion or RightRegion columns of Table 2A, 2B, or 2C, or a nucleotide sequence having at least 70%, 75%, 80%, 85%, 90%, 95%, 96%, 97%, 98%, or 99% identity thereto, or having no more than 1, 2, 3, 4, 5, 6, 7, 8, 9, 10, 11, 12, 13, 14, 15, 16, 17, 18, 19, or 20 sequence alterations (e.g., substitutions, insertions, or deletions) relative thereto; and
[0019] (ii) a heterologous object sequence.
   3. The system of embodiment 1 or 2, wherein the recombinase polypeptide comprises an amino acid sequence having at least 70% sequence identity to an amino acid sequence of Table 3A, 3B, or 3C.
   4. The system of embodiment 1 or 2, wherein the recombinase polypeptide comprises an amino acid sequence having at least 75% sequence identity to an amino acid sequence of Table 3A, 3B, or 3C.
   5. The system of embodiment 1 or 2, wherein the recombinase polypeptide comprises an amino acid sequence having at least 80% sequence identity to an amino acid sequence of Table 3A, 3B, or 3C.
   6. The system of embodiment 1 or 2, wherein the recombinase polypeptide comprises an amino acid sequence having at least 85% sequence identity to an amino acid sequence of Table 3A, 3B, or 3C.
   7. The system of embodiment 1 or 2, wherein the recombinase polypeptide comprises an amino acid sequence having at least 90% sequence identity to an amino acid sequence of Table 3A, 3B, or 3C.
   8. The system of embodiment 1 or 2, wherein the recombinase polypeptide comprises an amino acid sequence having at least 95% sequence identity to an amino acid sequence of Table 3A, 3B, or 3C.
   9. The system of embodiment 1 or 2, wherein the recombinase polypeptide comprises an amino acid sequence having at least 96% sequence identity to an amino acid sequence of Table 3A, 3B, or 3C.
   10. The system of embodiment 1 or 2, wherein the recombinase polypeptide comprises an amino acid sequence having at least 97% sequence identity to an amino acid sequence of Table 3A, 3B, or 3C.
   11. The system of embodiment 1 or 2, wherein the recombinase polypeptide comprises an amino acid sequence having at least 98% sequence identity to an amino acid sequence of Table 3A, 3B, or 3C.
   12. The system of embodiment 1 or 2, wherein the recombinase polypeptide comprises an amino acid sequence having at least 99% sequence identity to an amino acid sequence of Table 3A, 3B, or 3C.
   13. The system of embodiment 1 or 2, wherein the recombinase polypeptide comprises an amino acid sequence having 100% sequence identity to an amino acid sequence of Table 3A, 3B, or 3C.
   14. The system of any of embodiments 1-13, wherein (a) and (b) are in separate containers.
   15. The system of any of embodiments 1-13, wherein (a) and (b) are admixed.
   15a. The system of any of embodiments 1-15, wherein (b) comprises a linear double-stranded DNA.
   15b. The system of any of embodiments 1-15, wherein (b) comprises a circular double-stranded DNA.
   15c. The system of embodiment 15a, wherein (b) comprises:

[0020] (iii) a second DNA recognition sequence that binds to the recombinase polypeptide of (a),

[0021] said second DNA recognition sequence having a third parapalindromic sequence and a fourth parapalindromic sequence, wherein each parapalindromic sequence is about 15-35 or 20-30 nucleotides, and the third and fourth parapalindromic sequences together comprise a parapalindromic region occurring within a nucleotide sequence in the LeftRegion or RightRegion columns of Table 2A, 2B, or 2C, or a nucleotide sequence having at least 70%, 75%, 80%, 85%, 90%, 95%, 96%, 97%, 98%, or 99% identity to said parapalindromic region, or having no more than 1, 2, 3, 4, 5, 6, 7, 8, 9, 10, 11, 12, 13, 14, 15, 16, 17, 18, 19, or 20 sequence alterations (e.g., substitutions, insertions, or deletions) relative thereto, and

[0022] said second DNA recognition sequence further comprises a core sequence of about 2-20 nucleotides wherein the core sequence is situated between the third and fourth parapalindromic sequences.

15d-a. The system of embodiment 15c, wherein the first DNA recognition sequence has the same sequence as the second DNA recognition sequence.
15d-b. The system of embodiment 15c, wherein the first DNA recognition sequence does not have the same sequence as the second DNA recognition sequence (e.g., wherein the second DNA recognition sequence comprises at least one substitution, deletion, or insertion relative to the first DNA recognition sequence).
15d1. The system of embodiment 15d-b, wherein the first DNA recognition sequence has at least 70%, 75%, 80%, 85%, 90%, 95%, 96%, 97%, 98%, or 99% identity to the second DNA recognition sequence.
15e. The system of any of embodiments 15c-15d1, wherein the heterologous object sequence is situated between the first DNA recognition sequence and the second DNA recognition sequence.
15f. A system comprising a first circular RNA encoding the polypeptide of a Gene Writing system; and

[0023] a second circular RNA comprising a template nucleic acid of a Gene Writing system.

15g. A system for modifying DNA comprising:

[0024] (a) a polypeptide or a nucleic acid encoding a polypeptide, wherein the polypeptide comprises (i) a reverse transcriptase domain and (ii) an endonuclease domain; and

[0025] (b) a template nucleic acid comprising (i) a sequence that binds the polypeptide, (ii) a heterologous object sequence, and (iii) a ribozyme that is heterologous to (a)(i), (a)(ii), (b)(i), or a combination thereof.

15h. The system of embodiment 15g, wherein the ribozyme is heterologous to (b)(i).
15i. The system of embodiment 15g or 15h, wherein the template nucleic acid comprises (iv) a second ribozyme, e.g., that is endogenous to (a)(i), (a)(ii), (b)(i), or a combination thereof, e.g., wherein the second ribozyme is endogenous to (b)(i).
15j. The system of embodiment 15g or 15h, wherein the heterologous ribozyme replaced a ribozyme endogenous to (a)(i), (a)(ii), (b)(i), or a combination thereof, e.g., wherein the second ribozyme is endogenous to (b)(i).
15k. The system of any of embodiments 15f-15j, further comprising an mRNA encoding the polypeptide of a Gene Writing system.
15l. The system of any of embodiments 15f-15k, further comprising a DNA encoding the polypeptide of a Gene Writing system.
15m. The system of any of embodiments 15f-15l, further comprising a DNA comprising the insert DNA of a Gene Writing system.
15n. The system of any of embodiments 15f-15m, further comprising a DNA comprising the insert DNA and polypeptide of a Gene Writing system.
16. A cell (e.g., a eukaryotic cell, e.g., a mammalian cell, e.g., human cell; or a prokaryotic cell) comprising: a recombinase polypeptide comprising an amino acid sequence of Table 3A, 3B, or 3C, or an amino acid sequence having at least 70%, 75%, 80%, 85%, 90%, 95%, 96%, 97%, 98%, or 99% identity thereto, or a nucleic acid encoding the recombinase polypeptide.
16a. A cell comprising the system of any of embodiments 1-15e.
17. The cell of embodiment 16, which further comprises an insert DNA comprising:

[0026] (i) a DNA recognition sequence that binds to the recombinase polypeptide,

[0027] said DNA recognition sequence having a first parapalindromic sequence and a second parapalindromic sequence, wherein each parapalindromic sequence is about 15-35 or 20-30 nucleotides, and the first and second parapalindromic sequences together comprise a parapalindromic region occurring within a nucleotide sequence in the LeftRegion or RightRegion columns of Table 2A, 2B, or 2C, or a nucleotide sequence having at least 70%, 75%, 80%, 85%, 90%, 95%, 96%, 97%, 98%, or 99% identity to said parapalindromic region, or having no more than 1, 2, 3, 4, 5, 6, 7, 8, 9, 10, 11, 12, 13, 14, 15, 16, 17, 18, 19, or 20 sequence alterations (e.g., substitutions, insertions, or deletions) relative thereto, and

[0028] said DNA recognition sequence further comprises a core sequence of about 2-20 nucleotides wherein the core sequence is situated between the first and second parapalindromic sequences; and

[0029] (ii) optionally, a heterologous object sequence.

17a. The cell of embodiment 16, which further comprises an insert DNA comprising:
[0030] (i) a DNA recognition sequence that binds to the recombinase polypeptide of (a), wherein optionally the DNA recognition sequence comprises about 30-70 or 40-60 nucleotides of sequence occurring within a nucleotide sequence in the LeftRegion or RightRegion columns of Table 2A, 2B, or 2C, or a nucleotide sequence having at least 70%, 75%, 80%, 85%, 90%, 95%, 96%, 97%, 98%, or 99% identity to said parapalindromic region, or having no more than 1, 2, 3, 4, 5, 6, 7, 8, 9, 10, 11, 12, 13, 14, 15, 16, 17, 18, 19, or 20 sequence alterations (e.g., substitutions, insertions, or deletions) relative thereto; and
[0031] (ii) optionally, a heterologous object sequence.
   18. A cell (e.g., eukaryotic cell, e.g., mammalian cell, e.g., human cell; or a prokaryotic cell) comprising:

[0032] (i) a DNA recognition sequence, said DNA recognition sequence having a first parapalindromic sequence and a second parapalindromic sequence, wherein each parapalindromic sequence is about 15-35 or 20-30 nucleotides, and the first and second parapalindromic sequences together comprise a parapalindromic region occurring within a nucleotide sequence in the LeftRegion or RightRegion columns of Table 2A, 2B, or 2C, or a nucleotide sequence having at least 70%, 75%, 80%, 85%, 90%, 95%, 96%, 97%, 98%, or 99% identity to said parapalindromic region, or having no more than 1, 2, 3, 4, 5, 6, 7, 8, 9, 10, 11, 12, 13, 14, 15, 16, 17, 18, 19, or 20 sequence alterations (e.g., substitutions, insertions, or deletions) relative thereto, and

[0033] said DNA recognition sequence further comprises a core sequence of about 2-20 nucleotides wherein the core sequence is situated between the first and second parapalindromic sequences; and

[0034] (ii) a heterologous object sequence.

18a. A cell (e.g., eukaryotic cell, e.g., mammalian cell, e.g., human cell; or a prokaryotic cell) comprising on a chromosome:

[0035] (i) a first parapalindromic sequence of about 15-35 or 20-30 nucleotides, the first parapalindromic sequence occurring within a nucleotide sequence in the LeftRegion or RightRegion columns of Table 2A, 2B, or 2C, or a nucleotide sequence having at least 70%, 75%, 80%, 85%, 90%, 95%, 96%, 97%, 98%, or 99% identity to said parapalindromic sequence, or having no more than 1, 2, 3, 4, 5, 6, 7, 8, 9, 10, 11, 12, 13, 14, 15, 16, 17, 18, 19, or 20 sequence alterations (e.g., substitutions, insertions, or deletions) relative thereto,

[0036] (ii) a second parapalindromic sequence of about 15-35 or 20-30 nucleotides, the second parapalindromic sequence occurring within a nucleotide sequence in the LeftRegion or RightRegion columns of Table 2A, 2B, or 2C, or a nucleotide sequence having at least 70%, 75%, 80%, 85%, 90%, 95%, 96%, 97%, 98%, or 99% identity to said parapalindromic sequence, or having no more than 1, 2, 3, 4, 5, 6, 7, 8, 9, 10, 11, 12, 13, 14, 15, 16, 17, 18, 19, or 20 sequence alterations (e.g., substitutions, insertions, or deletions) relative thereto, and

[0037] (iii) a heterologous object sequence situated between (i) and (ii).

19a. The cell of embodiment 18, wherein the DNA recognition sequence and heterologous object sequence are both situated on an extra-chromosomal nucleic acid.
19. The cell of either of embodiments 18 or 19a, wherein the DNA recognition sequence is within 1, 2, 3, 4, 5, 6, 7, 8, 9, 10, 15, 20, 25, 30, 40, 50, 60, 70, 80, 90, or 100 nucleotides of the heterologous object sequence.
19c. The cell of either of embodiments 19a or 19, wherein the extra-chromosomal nucleic acid comprises:

[0038] (iii) a second DNA recognition sequence, said second DNA recognition sequence having a third parapalindromic sequence and a fourth parapalindromic sequence, wherein each parapalindromic sequence is about 15-35 or 20-30 nucleotides, and the third and fourth parapalindromic sequences together comprise a parapalindromic region occurring within a nucleotide sequence in the LeftRegion or RightRegion columns of Table 2A, 2B, or 2C, or a nucleotide sequence having at least 70%, 75%, 80%, 85%, 90%, 95%, 96%, 97%, 98%, or 99% identity to said parapalindromic region, or having no more than 1, 2, 3, 4, 5, 6, 7, 8, 9, 10, 11, 12, 13, 14, 15, 16, 17, 18, 19, or 20 sequence alterations (e.g., substitutions, insertions, or deletions) relative thereto, and

[0039] said second DNA recognition sequence further comprises a core sequence of about 2-20 nucleotides wherein the core sequence is situated between the third and fourth parapalindromic sequences.

19c1. The cell of embodiment 19c, wherein the first DNA recognition sequence has the same sequence as the second DNA recognition sequence.
19c2. The cell of embodiment 19c, wherein the first DNA recognition sequence does not have the same sequence as the second DNA recognition sequence (e.g., wherein the second DNA recognition sequence comprises at least one substitution, deletion, or insertion relative to the first DNA recognition sequence).
19c3. The cell of embodiment 19c2, wherein the first DNA recognition sequence has at least 70%, 75%, 80%, 85%, 90%, 95%, 96%, 97%, 98%, or 99% identity to the second DNA recognition sequence.
19c4. The cell of any of embodiments 19c-19c3, wherein the extra-chromosomal nucleic acid is linear.
19c5. The cell of any of embodiments 19c-19c4, wherein the cell comprises:

[0040] (iv) a third DNA recognition sequence, said third DNA recognition sequence having a fifth parapalindromic sequence and a sixth parapalindromic sequence, wherein each parapalindromic sequence is about 15-35 or 20-30 nucleotides, and the fifth and sixth parapalindromic sequences together comprise a parapalindromic region occurring within a nucleotide sequence in the LeftRegion or RightRegion columns of Table 2A, 2B, or 2C, or a nucleotide sequence having at least 70%, 75%, 80%, 85%, 90%, 95%, 96%, 97%, 98%, or 99% identity to said parapalindromic region, or having no more than 1, 2, 3, 4, 5, 6, 7, 8, 9, 10, 11, 12, 13, 14, 15, 16, 17, 18, 19, or 20 sequence alterations (e.g., substitutions, insertions, or deletions) relative thereto, and

[0041] said third DNA recognition sequence further comprises a core sequence of about 2-20 nucleotides wherein the core sequence is situated between the fifth and sixth parapalindromic sequences,

[0042] wherein the third DNA recognition sequence is on a chromosome.

19c6. The cell of embodiment 19c5, wherein the third DNA recognition sequence does not have the same sequence as the first DNA recognition sequence, the second DNA recognition sequence, or both of the first and second DNA recognition sequences (e.g., wherein the third DNA recognition sequence comprises at least one substitution, deletion, or insertion relative to the first and/or second DNA recognition sequences).
19c7. The cell of embodiment 19c6, wherein the third DNA recognition sequence has at least 70%, 75%, 80%, 85%, 90%, 95%, 96%, 97%, 98%, or 99% identity to the first DNA recognition sequence.
19c8. The cell of either of embodiments 19c6 or 19c7, wherein the third DNA recognition sequence has at least 70%, 75%, 80%, 85%, 90%, 95%, 96%, 97%, 98%, or 99% identity to the second DNA recognition sequence.
19c9. The cell of any of embodiments 19c5-19c8, wherein the cell comprises:

[0043] (v) a fourth DNA recognition sequence, said fourth DNA recognition sequence having a seventh parapalindromic sequence and an eighth parapalindromic sequence, wherein each parapalindromic sequence is about 15-35 or 20-30 nucleotides, and the seventh and eighth parapalindromic sequences together comprise a parapalindromic region occurring within a nucleotide sequence in the LeftRegion or RightRegion columns of Table 2A, 2B, or 2C, or a nucleotide sequence having at least 70%, 75%, 80%, 85%, 90%, 95%, 96%, 97%, 98%, or 99% identity thereto, or having no more than 1, 2, 3, 4, 5, 6, 7, 8, 9, 10, 11, 12, 13, 14, 15, 16, 17, 18, 19, or 20 sequence alterations (e.g., substitutions, insertions, or deletions) relative to said parapalindromic region, and

[0044] said fourth DNA recognition sequence further comprises a core sequence of about 2-20 nucleotides wherein the core sequence is situated between the seventh and eighth parapalindromic sequences,

[0045] wherein the fourth DNA recognition sequence is on the same chromosome as the third DNA recognition sequence.

19c10. The cell of embodiment 19c9, wherein the fourth DNA recognition sequence does not have the same sequence as the first DNA recognition sequence, the second DNA recognition sequence, or both of the first and second DNA recognition sequences (e.g., wherein the fourth DNA recognition sequence comprises at least one substitution, deletion, or insertion relative to the first and/or second DNA recognition sequences).
19c11. The cell of embodiment 19c10, wherein the fourth DNA recognition sequence has at least 70%, 75%, 80%, 85%, 90%, 95%, 96%, 97%, 98%, or 99% identity to the first DNA recognition sequence.
19c12. The cell of either of embodiments 19c10 or 19c11, wherein the fourth DNA recognition sequence has at least 70%, 75%, 80%, 85%, 90%, 95%, 96%, 97%, 98%, or 99% identity to the second DNA recognition sequence.
19c13. The cell of any of embodiments 19c9-19c12, wherein the fourth DNA recognition sequence has the same sequence as the third DNA recognition sequence.
19c14. The cell of embodiment 19c13, wherein the fourth DNA recognition sequence does not have the same sequence as the fourth DNA recognition sequence (e.g., wherein the fourth DNA recognition sequence comprises at least one substitution, deletion, or insertion relative to the third DNA recognition sequence).
19c15. The cell of embodiment 19c14, wherein the fourth DNA recognition sequence has at least 70%, 75%, 80%, 85%, 90%, 95%, 96%, 97%, 98%, or 99% identity to the third DNA recognition sequence.
19c16. The cell of any of embodiments 19c10-19c15, wherein the third DNA recognition sequence and fourth DNA recognition sequence are within 5, 10, 20, 30, 40, 50, 60, 70, 80, 90, 100, 200, 300, 400, 500, 600, 700, 800, or 900 bases of each other, or within 1, 2, 3, 4, 5, 6, 7, 8, 9, or 10 kilobases of each other on the chromosome.
20. The cell of any of embodiments 16a-18, wherein the DNA recognition sequence is in a chromosome and the heterologous object sequence is on an extra-chromosomal nucleic acid.
21. The cell of any of embodiments 16-20, wherein the cell is a eukaryotic cell.
22. The cell of embodiment 21, wherein the cell is a mammalian cell.
23. The cell of embodiment 22, wherein the cell is a human cell.
24. The cell of any of embodiments 16-20, wherein the cell is a prokaryotic cell (e.g., a bacterial cell).
26. The isolated eukaryotic cell of embodiment 25, wherein the cell is an animal cell (e.g., a mammalian cell) or a plant cell.
27. The isolated eukaryotic cell of embodiment 26, wherein the mammalian cell is a human cell.
28. The isolated eukaryotic cell of embodiment 26, wherein the animal cell is a bovine cell, horse cell, pig cell, goat cell, sheep cell, chicken cell, or turkey cell.
29. The isolated eukaryotic cell of embodiment 26, wherein the plant cell is a corn cell, soy cell, wheat cell, or rice cell.
30. A method of modifying the genome of a eukaryotic cell (e.g., mammalian cell, e.g., human cell) comprising contacting the cell with:

[0046] a) a recombinase polypeptide comprising an amino acid sequence of Table 3A, 3B, or 3C, or a sequence having at least 70%, 75%, 80%, 85%, 90%, 95%, 96%, 97%, 98%, or 99% identity thereto, or a nucleic acid encoding the recombinase polypeptide; and

[0047] b) an insert DNA comprising:

[0048] (i) a DNA recognition sequence that binds to the recombinase polypeptide of (a),

[0049] said DNA recognition sequence having a first parapalindromic sequence and a second parapalindromic sequence, wherein each parapalindromic sequence is about 15-35 or 20-30 nucleotides, and the first and second parapalindromic sequences together comprise a parapalindromic region occurring within a nucleotide sequence in the LeftRegion or RightRegion columns of Table 2A, 2B, or 2C, or a nucleotide sequence having at least 70%, 75%, 80%, 85%, 90%, 95%, 96%, 97%, 98%, or 99% identity to said parapalindromic region, or having no more than 1, 2, 3, 4, 5, 6, 7, 8, 9, 10, 11, 12, 13, 14, 15, 16, 17, 18, 19, or 20 sequence alterations (e.g., substitutions, insertions, or deletions) relative thereto, and
[0050] said DNA recognition sequence further comprises a core sequence of about 2-20 nucleotides wherein the core sequence is situated between the first and second parapalindromic sequences, and
[0051] (ii) a heterologous object sequence,

[0052] thereby modifying the genome of the eukaryotic cell.

30a. A method of modifying the genome of a eukaryotic cell (e.g., mammalian cell, e.g., human cell) comprising contacting the cell with:

[0053] a) a recombinase polypeptide comprising an amino acid sequence of Table 3A, 3B, or 3C, or a sequence having at least 70%, 75%, 80%, 85%, 90%, 95%, 96%, 97%, 98%, or 99% identity thereto, or a nucleic acid encoding the recombinase polypeptide; and

[0054] b) an insert DNA comprising:

[0055] (i) a DNA recognition sequence that binds to the recombinase polypeptide of (a), wherein optionally the DNA recognition sequence comprises about 30-70 or 40-60 nucleotides of sequence occurring within a nucleotide sequence in the LeftRegion or RightRegion columns of Table 2A, 2B, or 2C, or a nucleotide sequence having at least 70%, 75%, 80%, 85%, 90%, 95%, 96%, 97%, 98%, or 99% identity to said parapalindromic region, or having no more than 1, 2, 3, 4, 5, 6, 7, 8, 9, 10, 11, 12, 13, 14, 15, 16, 17, 18, 19, or 20 sequence alterations (e.g., substitutions, insertions, or deletions) relative thereto; and

[0056] said DNA recognition sequence further comprises a core sequence of about 2-20 nucleotides wherein the core sequence is situated between the first and second parapalindromic sequences, and

[0057] (ii) a heterologous object sequence,

[0058] thereby modifying the genome of the eukaryotic cell.

31. A method of inserting a heterologous object sequence into the genome of a eukaryotic cell (e.g., mammalian cell, e.g., human cell) comprising contacting the cell with:

[0059] a) a recombinase polypeptide comprising an amino acid sequence of Table 3A, 3B, or 3C, or a sequence having at least 70%, 75%, 80%, 85%, 90%, 95%, 96%, 97%, 98%, or 99% identity thereto, or a nucleic acid encoding the polypeptide; and

[0060] b) an insert DNA comprising:

[0061] (i) a DNA recognition sequence that binds to the recombinase polypeptide of (a),

[0062] said DNA recognition sequence having a first parapalindromic sequence and a second parapalindromic sequence, wherein each parapalindromic sequence is about 15-35 or 20-30 nucleotides, and the first and second parapalindromic sequences together comprise a parapalindromic region occurring within a nucleotide sequence in the LeftRegion or RightRegion columns of Table 2A, 2B, or 2C, or a nucleotide sequence having at least 70%, 75%, 80%, 85%, 90%, 95%, 96%, 97%, 98%, or 99% identity to said parapalindromic region, or having no more than 1, 2, 3, 4, 5, 6, 7, 8, 9, 10, 11, 12, 13, 14, 15, 16, 17, 18, 19, or 20 sequence alterations (e.g., substitutions, insertions, or deletions) relative thereto, and
[0063] said DNA recognition sequence further comprises a core sequence of about 2-20 nucleotides wherein the core sequence is situated between the first and second parapalindromic sequences, and

[0064] (ii) a heterologous object sequence,

[0065] thereby inserting the heterologous object sequence into the genome of the eukaryotic cell, e.g., at a frequency of at least about 0.1% (e.g., at least about 0.1%, 0.5%, 1%, 5%, 10%, 20%, 30%, 40%, 50%, 60%, 70%, 80%, 85%, 90%, 95%, 96%, 97%, 98%, 99%, or 100% of a population of the eukaryotic cell, e.g., as measured in an assay of Example 5.

31a. A method of inserting a heterologous object sequence into the genome of a eukaryotic cell (e.g., mammalian cell, e.g., human cell) comprising contacting the cell with:

[0066] a) a recombinase polypeptide comprising an amino acid sequence of Table 3A, 3B, or 3C, or a sequence having at least 70%, 75%, 80%, 85%, 90%, 95%, 96%, 97%, 98%, or 99% identity thereto, or a nucleic acid encoding the polypeptide; and

[0067] b) an insert DNA comprising:
[0068] (i) a DNA recognition sequence that binds to the recombinase polypeptide of (a), wherein optionally the DNA recognition sequence comprises about 30-70 or 40-60 nucleotides of sequence occurring within a nucleotide sequence in the LeftRegion or RightRegion columns of Table 2A, 2B, or 2C, or a nucleotide sequence having at least 70%, 75%, 80%, 85%, 90%, 95%, 96%, 97%, 98%, or 99% identity thereto, or having no more than 1, 2, 3, 4, 5, 6, 7, 8, 9, 10, 11, 12, 13, 14, 15, 16, 17, 18, 19, or 20 sequence alterations (e.g., substitutions, insertions, or deletions) relative thereto; and
[0069] (ii) a heterologous object sequence,

[0070] thereby inserting the heterologous object sequence into the genome of the eukaryotic cell, e.g., at a frequency of at least about 0.1% (e.g., at least about 0.1%, 0.5%, 1%, 5%, 10%, 20%, 30%, 40%, 50%, 60%, 70%, 80%, 85%, 90%, 95%, 96%, 97%, 98%, 99%, or 100% of a population of the eukaryotic cell, e.g., as measured in an assay of Example 5.

32. The method of any of embodiments 30-31a, wherein (a) and (b) are administered separately or together.
33. The method of any of embodiments 30-31a, wherein (a) is administered prior to, concurrently with, or after administration of (b).
34. The method of any of embodiments 30-33, wherein (a) comprises the nucleic acid encoding the polypeptide.
35. The method of embodiment 34, wherein the nucleic acid of (a) and the insert DNA of (b) are situated on the same nucleic acid molecule, e.g., are situated on the same vector.
36. The method of embodiment 34, wherein the nucleic acid of (a) and the insert DNA of (b) are situated on separate nucleic acid molecules.
37. The method of any of embodiments 30-36, wherein the cell has only one endogenous DNA recognition sequence that is compatible with the DNA recognition sequence of the insert DNA.
38. The method of any of embodiments 30-36, wherein the cell has two or more endogenous DNA recognition sequences that are compatible with the DNA recognition sequence of the insert DNA.
38a. The method of any of embodiments 30-38, wherein the insert DNA of (b) comprises a second DNA recognition sequence that binds to the recombinase polypeptide of (a),

[0071] said second DNA recognition sequence having a third parapalindromic sequence and a fourth parapalindromic sequence, wherein each parapalindromic sequence is about 15-35 or 20-30 nucleotides, and the third and fourth parapalindromic sequences together comprise a parapalindromic region occurring within a nucleotide sequence in the LeftRegion or RightRegion columns of Table 2A, 2B, or 2C, or a nucleotide sequence having at least 70%, 75%, 80%, 85%, 90%, 95%, 96%, 97%, 98%, or 99% identity to said parapalindromic region, or having no more than 1, 2, 3, 4, 5, 6, 7, 8, 9, 10, 11, 12, 13, 14, 15, 16, 17, 18, 19, or 20 sequence alterations (e.g., substitutions, insertions, or deletions) relative thereto, and

[0072] said second DNA recognition sequence further comprises a core sequence of about 2-20 nucleotides wherein the core sequence is situated between the third and fourth parapalindromic sequences.

38b. The method of embodiment 38a, wherein the first DNA recognition sequence has the same sequence as the second DNA recognition sequence.
38c. The method of embodiment 38a, wherein the first DNA recognition sequence does not have the same sequence as the second DNA recognition sequence (e.g., wherein the second DNA recognition sequence comprises at least one substitution, deletion, or insertion relative to the first DNA recognition sequence).
38d. The method of embodiment 38c, wherein the first DNA recognition sequence has at least 70%, 75%, 80%, 85%, 90%, 95%, 96%, 97%, 98%, or 99% identity to the second DNA recognition sequence.
38e. The method of any of embodiments 38a-38d, the heterologous object sequence is situated between the first DNA recognition sequence and the second DNA recognition sequence.
38f. The method of any of the preceding embodiments, wherein the recombinase polypeptide comprises an integrase, e.g., as listed in Table 30 or in FIG. 1A.
38g. The method of embodiment 38f, wherein the recombinase polypeptide comprises an integrase as listed in Table 30 and the DNA recognition sequence comprises a recognition sequence from the corresponding Line No of Table 2A, 2B, or 2C.
38h. The method of embodiment 38f or 38g, wherein the recombinase polypeptide comprises the amino acid sequence of Int101 (e.g., the sequence of a corresponding amino acid sequence as listed in Table 3A, 3B, or 3C, e.g., corresponding to Line No 475 or Accession ASN71805.1), optionally wherein the DNA recognition sequence comprises a recognition sequence from the corresponding Line No of Table 2A, 2B, or 2C (e.g., as listed in Line No 475).
38i. The method of embodiment 38f or 38g, wherein the recombinase polypeptide comprises the amino acid sequence of Int78 (e.g., the sequence of a corresponding amino acid sequence as listed in Table 3A, 3B, or 3C, e.g., corresponding to Line No 371 or Accession ARW58518.1), optionally wherein the DNA recognition sequence comprises a recognition sequence from the corresponding Line No of Table 2A, 2B, or 2C (e.g., as listed in Line No 371).
38j. The method of embodiment 38f or 38g, wherein the recombinase polypeptide comprises the amino acid sequence of Int79 (e.g., the sequence of a corresponding amino acid sequence as listed in Table 3A, 3B, or 3C, e.g., corresponding to Line No 360 or Accession ARW58461.1), optionally wherein the DNA recognition sequence comprises a recognition sequence from the corresponding Line No of Table 2A, 2B, or 2C (e.g., as listed in Line No 360).
38k. The method of embodiment 38f or 38g, wherein the recombinase polypeptide comprises the amino acid sequence of Int30 (e.g., the sequence of a corresponding amino acid sequence as listed in Table 3A, 3B, or 3C, e.g., corresponding to Line No 436 or Accession YP_009103095.1), optionally wherein the DNA recognition sequence comprises a recognition sequence from the corresponding Line No of Table 2A, 2B, or 2C (e.g., as listed in Line No 436).
38l. The method of embodiment 38f or 38g, wherein the recombinase polypeptide comprises the amino acid sequence of Int3 (e.g., the sequence of a corresponding amino acid sequence as listed in Table 3A, 3B, or 3C, e.g., corresponding to Line No 1200 or Accession YP_459991.1), optionally wherein the DNA recognition sequence comprises a recognition sequence from the corresponding Line No of Table 2A, 2B, or 2C (e.g., as listed in Line No 1200).
38m. The method of embodiment 38f or 38g, wherein the recombinase polypeptide comprises the amino acid sequence of Int38 (e.g., the sequence of a corresponding amino acid sequence as listed in Table 3A, 3B, or 3C, e.g., corresponding to Line No 408 or Accession YP_009223181.1), optionally wherein the DNA recognition sequence comprises a recognition sequence from the corresponding Line No of Table 2A, 2B, or 2C (e.g., as listed in Line No 408).
38n. The method of embodiment 38f or 38g, wherein the recombinase polypeptide comprises the amino acid sequence of Int95 (e.g., the sequence of a corresponding amino acid sequence as listed in Table 3A, 3B, or 3C, e.g., corresponding to Line No460 or Accession AFV15398.1), optionally wherein the DNA recognition sequence comprises a recognition sequence from the corresponding Line No of Table 2A, 2B, or 2C (e.g., as listed in Line No 460).
38o. The method of embodiment 38f or 38g, wherein the recombinase polypeptide comprises the amino acid sequence of Int51 (e.g., the sequence of a corresponding amino acid sequence as listed in Table 3A, 3B, or 3C, e.g., corresponding to Line No 159 or Accession AOT24690.1), optionally wherein the DNA recognition sequence comprises a recognition sequence from the corresponding Line No of Table 2A, 2B, or 2C (e.g., as listed in Line No 159).
38p. The method of embodiment 38f or 38g, wherein the recombinase polypeptide comprises the amino acid sequence of Int18 (e.g., the sequence of a corresponding amino acid sequence as listed in Table 3A, 3B, or 3C, e.g., corresponding to Line No 103 or Accession AGR47239.1), optionally wherein the DNA recognition sequence comprises a recognition sequence from the corresponding Line No of Table 2A, 2B, or 2C (e.g., as listed in Line No 103).
39. An isolated recombinase polypeptide comprising an amino acid sequence of Table 3A, 3B, or 3C, or a sequence having at least 70%, 75%, 80%, 85%, 90%, 95%, 96%, 97%, 98%, or 99% identity thereto.
40. The isolated recombinase polypeptide of embodiment 39, which comprises at least one insertion, deletion, or substitution relative to a recombinase sequence of Table 3A, 3B, or 3C.
41. The isolated recombinase polypeptide of embodiment 40, wherein the isolated recombinase polypeptide binds a eukaryotic (e.g., mammalian, e.g., human) genomic locus (e.g., a parapalindromic region occurring within a nucleotide sequence in the LeftRegion or RightRegion columns of Table 2A, 2B, or 2C, or a nucleotide sequence having at least 70%, 75%, 80%, 85%, 90%, 95%, 96%, 97%, 98%, or 99% identity to said parapalindromic region, or having no more than 1, 2, 3, 4, 5, 6, 7, 8, 9, 10, 11, 12, 13, 14, 15, 16, 17, 18, 19, or 20 sequence alterations (e.g., substitutions, insertions, or deletions) relative thereto.
41a. The isolated recombinase polypeptide of either of embodiments 39 or 40, wherein the isolated recombinase polypeptide binds a parapalindromic region occurring within a nucleotide sequence in the LeftRegion or RightRegion columns of Table 2A, 2B, or 2C, or a nucleotide sequence having at least 70%, 75%, 80%, 85%, 90%, 95%, 96%, 97%, 98%, or 99% identity to said parapalindromic region, or having no more than 1, 2, 3, 4, 5, 6, 7, 8, 9, 10, 11, 12, 13, 14, 15, 16, 17, 18, 19, or 20 sequence alterations (e.g., substitutions, insertions, or deletions) relative thereto.
42. The isolated recombinase polypeptide of any of embodiments 40-41a, wherein the isolated recombinase polypeptide has at least a 2-, 3-, 4-, or 5-fold increase in affinity for the genomic locus, relative to the corresponding unmodified amino acid sequence of Table 3A, 3B, or 3C.
43. An isolated nucleic acid encoding a recombinase polypeptide comprising an amino acid sequence of Table 3A, 3B, or 3C, or an amino acid sequence having at least 70%, 75%, 80%, 85%, 90%, 95%, 96%, 97%, 98%, or 99% identity thereto.
44. The isolated nucleic acid of embodiment 43, which encodes a recombinase polypeptide comprising at least one insertion, deletion, or substitution relative to a recombinase sequence of Table 3A, 3B, or 3C.
45. The isolated nucleic acid sequence of embodiment 43 or 44, wherein the codons of the amino acid sequence are altered (e.g., optimized) for expression in a mammalian cell, e.g., a human cell.
46. The isolated nucleic acid of any of embodiments 43-45, which further comprises a heterologous promoter (e.g., a mammalian promoter, e.g., a tissue-specific promoter), microRNA (e.g., a tissue-specific restrictive miRNA), polyadenylation signal, or a heterologous payload.
47. An isolated nucleic acid (e.g., DNA) comprising: (i) a DNA recognition sequence, said DNA recognition sequence having a first parapalindromic sequence and a second parapalindromic sequence, wherein each parapalindromic sequence is about 15-35 or 20-30 nucleotides, and the first and second parapalindromic sequences together comprise a parapalindromic region occurring within a nucleotide sequence in the LeftRegion or RightRegion columns of Table 2A, 2B, or 2C, or a nucleotide sequence having at least 70%, 75%, 80%, 85%, 90%, 95%, 96%, 97%, 98%, or 99% identity to said parapalindromic region, or having no more than 1, 2, 3, 4, 5, 6, 7, 8, 9, 10, 11, 12, 13, 14, 15, 16, 17, 18, 19, or 20 sequence alterations (e.g., substitutions, insertions, or deletions) relative thereto, and

[0073] said DNA recognition sequence further comprises a core sequence of about 2-20 nucleotides wherein the core sequence is situated between the first and second parapalindromic sequences, and

[0074] (ii) a heterologous object sequence.

47a. An isolated nucleic acid (e.g., DNA) comprising:
[0075] (i) a DNA recognition sequence that binds to the recombinase polypeptide of (a), wherein optionally the DNA recognition sequence comprises about 30-70 or 40-60 nucleotides of sequence occurring within a nucleotide sequence in the LeftRegion or RightRegion columns of Table 2A, 2B, or 2C, or a nucleotide sequence having at least 70%, 75%, 80%, 85%, 90%, 95%, 96%, 97%, 98%, or 99% identity thereto, or having no more than 1, 2, 3, 4, 5, 6, 7, 8, 9, 10, 11, 12, 13, 14, 15, 16, 17, 18, 19, or 20 sequence alterations (e.g., substitutions, insertions, or deletions) relative to said parapalindromic region; and
[0076] (ii) optionally, a heterologous object sequence.
   48. The isolated nucleic acid of either of embodiments 47 or 47a, which binds to a recombinase polypeptide of Table 3A, 3B, or 3C.
   48a. The isolated nucleic acid of any of embodiments 47-48, wherein the DNA recognition sequence (e.g., one or more parapalindromic sequences) comprises at least one insertion, deletion, or substitution relative to a recognition sequence (or portion thereof) occurring in a sequence of the LeftRegion or RightRegion columns of Table 2A, 2B, or 2C.
   48b. The isolated nucleic acid of embodiment 48a, wherein the DNA recognition sequence (e.g., parapalindromic region) has at least a 2-, 3-, 4-, or 5-fold increase in affinity for the recombinase polypeptide relative to the corresponding unmodified DNA recognition sequence (e.g., parapalindromic region).
   48c. The isolated nucleic acid of either of embodiments 48a or 48b, wherein the recombinase polypeptide has at least a 2-, 3-, 4-, or 5-fold increase in recombinase activity at the DNA recognition sequence (e.g., parapalindromic region) relative to the corresponding unmodified DNA recognition sequence (e.g., parapalindromic region).
   49. A method of making a recombinase polypeptide, the method comprising:

[0077] a) providing a nucleic acid encoding a recombinase polypeptide comprising an amino acid sequence of Table 3A, 3B, or 3C, or a sequence having at least 70%, 75%, 80%, 85%, 90%, 95%, 96%, 97%, 98%, or 99% identity thereto, and

[0078] b) introducing the nucleic acid into a cell (e.g., a eukaryotic cell or a prokaryotic cell, e.g., as described herein) under conditions that allow for production of the recombinase polypeptide,

[0079] thereby making the recombinase polypeptide.

50. A method of making a recombinase polypeptide, the method comprising:

[0080] a) providing a cell (e.g., a prokaryotic or eukaryotic cell) comprising a nucleic acid encoding a recombinase polypeptide comprising an amino acid sequence of Table 3A, 3B, or 3C, or a sequence having at least 70%, 75%, 80%, 85%, 90%, 95%, 96%, 97%, 98%, or 99% identity thereto, and

[0081] b) incubating the cell under conditions that allow for production of the recombinase polypeptide,

[0082] thereby making the recombinase polypeptide.

51. A method of making an insert DNA that comprises a DNA recognition sequence and a heterologous sequence, comprising:

[0083] a) providing a nucleic acid comprising:
[0084] (i) a DNA recognition sequence that binds to a recombinase polypeptide comprising an amino acid sequence of Table 3A, 3B, or 3C, or a sequence having at least 70%, 75%, 80%, 85%, 90%, 95%, 96%, 97%, 98%, or 99% identity thereto,
   [0085] said DNA recognition sequence having a first parapalindromic sequence and a second parapalindromic sequence, wherein each parapalindromic sequence is about 15-35 or 20-30 nucleotides, and the first and second parapalindromic sequences together comprise a parapalindromic region occurring within a nucleotide sequence in the LeftRegion or RightRegion columns of Table 2A, 2B, or 2C, or a nucleotide sequence having at least 70%, 75%, 80%, 85%, 90%, 95%, 96%, 97%, 98%, or 99% identity to said parapalindromic region, or having no more than 1, 2, 3, 4, 5, 6, 7, 8, 9, 10, 11, 12, 13, 14, 15, 16, 17, 18, 19, or 20 sequence alterations (e.g., substitutions, insertions, or deletions) relative thereto, and
      [0086] said DNA recognition sequence further comprises a core sequence of about 2-20 nucleotides wherein the core sequence is situated between the first and second parapalindromic sequences, and
[0087] (ii) a heterologous object sequence, and

[0088] b) introducing the nucleic acid into a cell (e.g., a eukaryotic cell or a prokaryotic cell, e.g., as described herein) under conditions that allow for replication of the nucleic acid,

[0089] thereby making the insert DNA.

51a. The method of embodiment 51, wherein the nucleic acid comprises:

[0090] (iii) a second DNA recognition sequence that binds to the recombinase polypeptide,

[0091] said second DNA recognition sequence having a third parapalindromic sequence and a fourth parapalindromic sequence, wherein each parapalindromic sequence is about 15-35 or 20-30 nucleotides, and the third and fourth parapalindromic sequences together comprise a parapalindromic region occurring within a nucleotide sequence in the LeftRegion or RightRegion columns of Table 2A, 2B, or 2C, or a nucleotide sequence having at least 70%, 75%, 80%, 85%, 90%, 95%, 96%, 97%, 98%, or 99% identity to said parapalindromic region, or having no more than 1, 2, 3, 4, 5, 6, 7, 8, 9, 10, 11, 12, 13, 14, 15, 16, 17, 18, 19, or 20 sequence alterations (e.g., substitutions, insertions, or deletions) relative thereto, and

[0092] said second DNA recognition sequence further comprises a core sequence of about 2-20 nucleotides wherein the core sequence is situated between the third and fourth parapalindromic sequences.

51b. The method of embodiment 51a, wherein the first DNA recognition sequence has the same sequence as the second DNA recognition sequence.
51c. The method of embodiment 51a, wherein the first DNA recognition sequence does not have the same sequence as the second DNA recognition sequence (e.g., wherein the second DNA recognition sequence comprises at least one substitution, deletion, or insertion relative to the first DNA recognition sequence).
51d. The method of embodiment 51c, wherein the first DNA recognition sequence has at least 70%, 75%, 80%, 85%, 90%, 95%, 96%, 97%, 98%, or 99% identity to the second DNA recognition sequence.
51e. The method of any of embodiments 51a-51d, the heterologous object sequence is situated between the first DNA recognition sequence and the second DNA recognition sequence.
51f. The method of any of embodiments 51-51e, wherein providing comprises using a cloning technique (e.g., restriction digestion and/or ligation), using a recombination technique, or acquiring the nucleic acid (e.g., from a third party provider).
52. The system, cell, method, isolated recombinase polypeptide, or isolated nucleic acid of any of the preceding embodiments, wherein the recombinase polypeptide comprises at least one insertion, deletion, or substitution relative to the amino acid sequence of Table 3A, 3B, or 3C.
53. The system, cell, method, isolated recombinase polypeptide, or isolated nucleic acid of any of the preceding embodiments, wherein the recombinase polypeptide comprises a truncation at the N-terminus, C-terminus, or both of the N- and C-termini relative to the amino acid sequence of Table 3A, 3B, or 3C.
54. The system, cell, method, isolated recombinase polypeptide, or isolated nucleic acid of any of the preceding embodiments, wherein the recombinase polypeptide comprises a nuclear localization sequence, e.g., an endogenous nuclear localization sequence or a heterologous nuclear localization sequence.
55. The system, cell, method, isolated recombinase polypeptide, or isolated nucleic acid of any of the preceding embodiments, wherein the heterologous object sequence is inserted into the genome of the cell at an efficiency of at least about 0.1% (e.g., at least about 0.1%, 0.5%, 1%, 5%, 10%, 20%, 30%, 40%, 50%, 60%, 70%, 80%, 85%, 90%, 95%, 96%, 97%, 98%, 99%, or 100%) of a population of the cell, e.g., as measured in an assay of Example 5.
56. The system, cell, method, isolated recombinase polypeptide, or isolated nucleic acid of any of the preceding embodiments, wherein the heterologous object sequence is inserted into a site within the genome of the cell (e.g., a site comprising a sequence occurring within a nucleotide sequence: in the LeftRegion or RightRegion columns of Table 2A, 2B, or 2C, or a nucleotide sequence having at least 70%, 75%, 80%, 85%, 90%, 95%, 96%, 97%, 98%, or 99% identity thereto, or having no more than 1, 2, 3, 4, 5, 6, 7, 8, 9, 10, 11, 12, 13, 14, 15, 16, 17, 18, 19, or 20 sequence alterations (e.g., substitutions, insertions, or deletions) relative thereto; and/or corresponding to the line number for a recombinase listed in Table 3A, 3B, or 3C) in at least about 1%, (e.g., at least about 1%, 5%, 10%, 15%, 20%, 25%, 30%, 40%, 50%, 60%, 70%, 80%, 85%, 90%, 95%, 96%, 97%, 98%, 99%, 99.9%, or 100%) of insertion events, e.g., as measured by an assay of Example 4.
57. The system, cell, method, isolated recombinase polypeptide, or isolated nucleic acid of any of the preceding embodiments, wherein, in a population of the cells (e.g., contacted with the system), the heterologous object sequence is inserted into between 1-10, e.g., 1-9, 1-8, 1-7, 1-6, 1-5, 1-4, 1-3, 2-10, 2-5, 2-4, 3-10, 3-5, or 5-10 sites within the genome of the cell (e.g., a site comprising a sequence occurring within a nucleotide sequence: in the LeftRegion or RightRegion columns of Table 2A, 2B, or 2C, or a nucleotide sequence having at least 70%, 75%, 80%, 85%, 90%, 95%, 96%, 97%, 98%, or 99% identity thereto, or having no more than 1, 2, 3, 4, 5, 6, 7, 8, 9, 10, 11, 12, 13, 14, 15, 16, 17, 18, 19, or 20 sequence alterations (e.g., substitutions, insertions, or deletions) relative thereto; and/or corresponding to the line number for a recombinase listed in Table 3A, 3B, or 3C), in at least 1%, 5%, 10%, 15%, 20%, 25%, 30%, 40%, 50%, 60%, 70%, 80%, 85%, 90%, 95%, 96%, 97%, 98%, 99%, 99.9%, or 100%) of the cells in the population, e.g., as measured by an assay of Example 5.
58. The system, cell, method, isolated recombinase polypeptide, or isolated nucleic acid of any of the preceding embodiments, wherein, in a population of cells contacted with the system, the heterologous object sequence is inserted into exactly one site within the genome of the cell (e.g., a site comprising a sequence occurring within a nucleotide sequence: in the LeftRegion or RightRegion columns of Table 2A, 2B, or 2C, or a nucleotide sequence having at least 70%, 75%, 80%, 85%, 90%, 95%, 96%, 97%, 98%, or 99% identity thereto, or having no more than 1, 2, 3, 4, 5, 6, 7, 8, 9, 10, 11, 12, 13, 14, 15, 16, 17, 18, 19, or 20 sequence alterations (e.g., substitutions, insertions, or deletions) relative thereto; and/or corresponding to the line number for a recombinase listed in Table 3A, 3B, or 3C), in at least 1%, 5%, 10%, 15%, 20%, 25%, 30%, 40%, 50%, 60%, 70%, 80%, 85%, 90%, 95%, 96%, 97%, 98%, 99%, 99.9%, or 100%) of the cells in the population, e.g., as measured by an assay of Example 4.
59. The system, cell, method, isolated recombinase polypeptide, or isolated nucleic acid of any of the preceding embodiments, wherein the heterologous object sequence is inserted into between 1-10, e.g., 1-9, 1-8, 1-7, 1-6, 1-5, 1-4, 1-3, 2-10, 2-5, 2-4, 3-10, 3-5, or 5-10 sites within the genome of the cell (e.g., a site comprising a sequence occurring within a nucleotide sequence: in the LeftRegion or RightRegion columns of Table 2A, 2B, or 2C, or a nucleotide sequence having at least 70%, 75%, 80%, 85%, 90%, 95%, 96%, 97%, 98%, or 99% identity thereto, or having no more than 1, 2, 3, 4, 5, 6, 7, 8, 9, 10, 11, 12, 13, 14, 15, 16, 17, 18, 19, or 20 sequence alterations (e.g., substitutions, insertions, or deletions) relative thereto; and/or corresponding to the row for a recombinase listed in Table 3A, 3B, or 3C), e.g., as measured by an assay of Example 4.
60. The system, cell, method, isolated recombinase polypeptide, or isolated nucleic acid of any of the preceding embodiments, wherein the recombinase polypeptide is bound to the insert DNA.
61. The system, cell, method, isolated recombinase polypeptide, or isolated nucleic acid of any of the preceding embodiments, wherein the recombinase polypeptide is provided by providing a nucleic acid encoding the recombinase polypeptide.
62. The system, cell, method, isolated recombinase polypeptide, or isolated nucleic acid of any of the preceding embodiments, which results in an insert frequency of the heterologous object sequence into the genome of at least about 0.1% (e.g., at least about 0.1%, 0.5%, 1%, 5%, 10%, 20%, 30%, 40%, 50%, 60%, 70%, 80%, 85%, 90%, 95%, 96%, 97%, 98%, 99%, or 100%) of a population of the cells, e.g., as measured in an assay of Example 5.
62a. The system, cell, method, isolated recombinase polypeptide, or isolated nucleic acid of any of the preceding embodiments, which results in an insert frequency of the heterologous object sequence into the genome of at least about 0.1% (e.g., at least about 0.1%, 0.5%, 1%, 5%, 10%, 20%, 30%, 40%, 50%, 60%, 70%, 80%, 85%, 90%, 95%, 96%, 97%, 98%, 99%, or 100%) of a population of the cells, e.g., as measured in an assay of Example 13.
62b. The system, cell, method, isolated recombinase polypeptide, or isolated nucleic acid of any of the preceding embodiments, which results in an insert frequency of the heterologous object sequence into the genome of at least about 0.1% (e.g., at least about 0.1%, 0.5%, 1%, 5%, 10%, 20%, 30%, 40%, 50%, 60%, 70%, 80%, 85%, 90%, 95%, 96%, 97%, 98%, 99%, or 100%) of a population of the cells, e.g., as measured in an assay of Example 7.
63. The system, cell, method, isolated recombinase polypeptide, or isolated nucleic acid of any of the preceding embodiments, wherein the first parapalindromic sequence comprises a first sequence of 15-35 or 20-30 nucleotides, e.g., 13, 14, 15, 16, 17, 18, 19, or 2015, 16, 17, 18, 19, 20, 21, 22, 23, 24, 25, 26, 27, 28, 29, 30, 31, 32 33, 34, or 35 nucleotides, occurring in a sequence found in the LeftRegion or RightRegion column of Table 2A, 2B, or 2C, or a sequence having no more than 1, 2, 3, 4, 5, 6, 7, 8, 9, 10, 11, 12, 13, 14, 15, 16, 17, 18, 19, or 20 substitutions, insertions, or deletions relative thereto.
64. The system, cell, method, isolated recombinase polypeptide, or isolated nucleic acid of embodiment 63, wherein the second parapalindromic sequence comprises a second sequence of 15-35 or 20-30 nucleotides, e.g., 15, 16, 17, 18, 19, 20, 21, 22, 23, 24, 25, 26, 27, 28, 29, 30, 31, 32 33, 34, or 35 nucleotides, occurring in a sequence found in the LeftRegion or RightRegion column of Table 2A, 2B, or 2C, 13, 14, 15, 16, 17, 18, 19, or 20 or a sequence having no more than 1, 2, 3, 4, 5, 6, 7, 8, 9, 10, 11, 12, 13, 14, 15, 16, 17, 18, 19, or 20 substitutions, insertions, or deletions relative thereto.
65. The system, cell, method, isolated recombinase polypeptide, or isolated nucleic acid of any of the preceding embodiments, wherein the insert DNA further comprises a core sequence comprising the about 2-20, e.g., 2-16, nucleotides situated between the first and second parapalindromic sequences found in the LeftRegion or RightRegion columns of Table 2A, 2B, or 2C, or a sequence having no more than 1, 2, 3, 4, 5, 6, 7, 8, 9, 10, 11, 12, 13, 14, 15, 16, 17, 18, 19, or 20 substitutions, insertions, or deletions relative thereto.
66. The system, cell, method, isolated recombinase polypeptide, or isolated nucleic acid of any of the preceding embodiments, wherein the first and second parapalindromic sequences comprise a perfectly palindromic sequence.
67. The system, cell, method, isolated recombinase polypeptide, or isolated nucleic acid of any of the preceding embodiments, wherein the first and/or second parapalindromic sequence comprises 1, 2, 3, 4, 5, 6, 7, 8, 9, 10, 11, 12, 13, 14, 15, 16, 17, 18, 19, or 20 non-palindromic positions.
69. The system, cell, method, isolated recombinase polypeptide, or isolated nucleic acid of any of the preceding embodiments, wherein the first and second parapalindromic sequences are the same length.
70. The system, cell, method, isolated recombinase polypeptide, or isolated nucleic acid of any of the preceding embodiments, wherein the core sequence is about 2-20 nucleotides (e.g., 2-16 nucleotides) in length.
71. The system, cell, method, isolated recombinase polypeptide, or isolated nucleic acid of any of the preceding embodiments, wherein the core sequence, e.g., the core dinucleotide, is capable of hybridizing to a corresponding sequence, e.g., dinucleotide, in the human genome, or the reverse complement thereof.
72. The system, cell, method, isolated recombinase polypeptide, or isolated nucleic acid of any of the preceding embodiments, wherein the core sequence has at least 10%, 20%, 30%, 40%, 50%, 60%, 70%, 80%, or 90% identity to a corresponding sequence in the human genome.
73. The system, cell, method, isolated recombinase polypeptide, or isolated nucleic acid of any of the preceding embodiments, wherein the core sequence has no more than 1, 2, 3, 4, 5, 6, 7, 8, 9, 10, 11, 12, 13, 14, or 15 mismatches to a corresponding sequence in the human genome.
74. The system, cell, method, isolated recombinase polypeptide, or isolated nucleic acid of any of the preceding embodiments, wherein the core sequence (e.g., core dinucleotide), when cleaved by the recombinase, forms a sticky end that is capable of hybridizing to a corresponding sequence in the human genome.
75. The system, cell, method, isolated recombinase polypeptide, or isolated nucleic acid of any of the preceding embodiments, wherein the heterologous object sequence comprises a eukaryotic gene, e.g., a mammalian gene, e.g., human gene, e.g., a blood factor (e.g., genome factor I, II, V, VII, X, XI, XII or XIII) or enzyme, e.g., lysosomal enzyme, or synthetic human gene (e.g. a chimeric antigen receptor).
76. The system, cell, method, isolated recombinase polypeptide, or isolated nucleic acid of any of the preceding embodiments, wherein the insert DNA comprises a heterologous object sequence and a DNA recognition sequence.
77. The system, cell, method, isolated recombinase polypeptide, or isolated nucleic acid of any of the preceding embodiments, wherein the insert DNA comprises a nucleic acid sequence encoding the recombinase polypeptide.
78. The system, cell, method, isolated recombinase polypeptide, or isolated nucleic acid of any of the preceding embodiments, wherein the insert DNA and a nucleic acid encoding the recombinase polypeptide are present in separate nucleic acid molecules.
79. The system, cell, method, isolated recombinase polypeptide, or isolated nucleic acid of any of embodiments 1-77, wherein the insert DNA and a nucleic acid encoding the recombinase polypeptide are present in the same nucleic acid molecule.
80. The system, cell, method, isolated recombinase polypeptide, or isolated nucleic acid of any of the preceding embodiments, wherein the insert DNA further comprises:
[0093] (a) an open reading frame, e.g., a sequence encoding a polypeptide, e.g., an enzyme (e.g., a lysosomal enzyme), a blood factor, an exon.
[0094] (b) a non-coding and/or regulatory sequence, e.g., a sequence that binds a transcriptional modulator, e.g., a promoter (e.g., a heterologous promoter), an enhancer, an insulator.
[0095] (c) a splice acceptor site;
[0096] (d) a polyA site;
[0097] (e) an epigenetic modification site; or
[0098] (f) a gene expression unit.
   81. The system, cell, method, isolated recombinase polypeptide, or isolated nucleic acid of any of the preceding embodiments, wherein the insert DNA comprises a plasmid, viral vector (e.g., lentiviral vector or episomal viral vector), or other self-replicating vector.
   82. The system, cell, method, isolated recombinase polypeptide, or isolated nucleic acid of any of the preceding embodiments, wherein the cell does not comprise an endogenous human gene comprised by the heterologous object sequence, or does not comprise a protein encoded by said gene.
   83. The system, cell, method, isolated recombinase polypeptide, or isolated nucleic acid of any of the preceding embodiments, wherein the cell is from an organism that does not comprise an endogenous human gene comprised by the heterologous object sequence, or does not comprise a protein encoded by said gene.
   84. The system, cell, method, isolated recombinase polypeptide, or isolated nucleic acid of any of the preceding embodiments, wherein the cell comprises an endogenous human DNA recognition sequence.
   85. The system, cell, method, isolated recombinase polypeptide, or isolated nucleic acid of embodiment 84, wherein the endogenous human DNA recognition sequence is operably linked to, e.g., is situated in a site within the human genome having at least 1, 2, 3, 4, 5, 6, 7, 8 or 9 of the following criteria:
   (i) is located >300 kb from a cancer-related gene;
   (ii) is >300 kb from a miRNA/other functional small RNA;
   (iii) is >50 kb from a 5′ gene end;
   (iv) is >50 kb from a replication origin;
   (v) is >50 kb away from any ultraconserved element;
   (vi) has low transcriptional activity (i.e. no mRNA+/−25 kb); (vii) is not in copy number variable region;
   (viii) is in open chromatin; and/or
   (ix) is unique, e.g., with 1 copy in the human genome.
   85a. The system, cell, method, isolated recombinase polypeptide, or isolated nucleic acid of either of embodiments 84 or 85, wherein the cell comprises a second endogenous human DNA recognition sequence.
   85b. The system, cell, method, isolated recombinase polypeptide, or isolated nucleic acid of embodiment 85a, wherein the second endogenous human DNA recognition sequence is operably linked to, e.g., is situated in a site within the human genome having at least 1, 2, 3, 4, 5, 6, 7, 8 or 9 of the following criteria:
   (i) is located >300 kb from a cancer-related gene;
   (ii) is >300 kb from a miRNA/other functional small RNA;
   (iii) is >50 kb from a 5′ gene end;
   (iv) is >50 kb from a replication origin;
   (v) is >50 kb away from any ultraconserved element;
   (vi) has low transcriptional activity (i.e. no mRNA+/−25 kb); (vii) is not in copy number variable region;
   (viii) is in open chromatin; and/or
   (ix) is unique, e.g., with 1 copy in the human genome.
   86. The system, cell, method, isolated recombinase polypeptide, or isolated nucleic acid of any of the preceding embodiments, wherein the cell is an animal cell, e.g., a mammalian cell, e.g., a human cell.
   87. The system, cell, method, isolated recombinase polypeptide, or isolated nucleic acid of any of the preceding embodiments, wherein the cell is a plant cell.
   88. The system, cell, method, isolated recombinase polypeptide, or isolated nucleic acid of any of the preceding embodiments, wherein the cell is not genetically modified.
   89. The system, cell, method, isolated recombinase polypeptide, or isolated nucleic acid of any of the preceding embodiments, wherein the cell does not comprise an attB or attP site.
   89a. The system, cell, method, isolated recombinase polypeptide, or isolated nucleic acid of any of the preceding embodiments, wherein the cell (e.g., prior to contacting with the system) comprises a pseudo-recognition sequence.
   89b. The system, cell, method, isolated recombinase polypeptide, or isolated nucleic acid of any of the preceding embodiments, wherein the cell (e.g., prior to contacting with the system) comprises exactly one pseudo-recognition sequence.
   90. The system, cell, method, isolated recombinase polypeptide, or isolated nucleic acid of any of the preceding embodiments, wherein the recombinase polypeptide comprises an amino acid sequence corresponding to a single amino acid sequence of Table 3A, 3B, or 3C.
   91. The system, cell, method, isolated recombinase polypeptide, or isolated nucleic acid of any of the preceding embodiments, wherein the recombinase polypeptide comprises all or a portion of a plurality of amino acid sequences of Table 3A, 3B, or 3C.
   92. The system, cell, method, isolated recombinase polypeptide, or isolated nucleic acid of embodiment 91, wherein the recombinase polypeptide comprises a first amino acid sequence from a portion of a first recombinase polypeptide sequence of Table 3A, 3B, or 3C and a second amino acid sequence from a portion of a second, different recombinase polypeptide sequence of Table 3A, 3B, or 3C.
   93. The system, cell, method, isolated recombinase polypeptide, or isolated nucleic acid of embodiment 92, wherein the first amino acid sequence corresponds to a domain of the first recombinase polypeptide (e.g., an N-terminal catalytic domain, a recombinase domain, a zinc ribbon domain, or a C-terminal DNA binding domain).
   94. The system, cell, method, isolated recombinase polypeptide, or isolated nucleic acid of either of embodiments 92 or 93, wherein the second amino acid sequence corresponds to a domain of the second recombinase polypeptide (e.g., an N-terminal catalytic domain, a recombinase domain, a zinc ribbon domain, or a C-terminal DNA binding domain), e.g., a different domain than the domain of the first amino acid sequence.
   95. The system, cell, method, isolated recombinase polypeptide, or isolated nucleic acid of any of the preceding embodiments, wherein one or more of the core sequences of the insert DNA comprises a core dinucleotide that has been altered to match a core dinucleotide of a target recognition sequence in genomic DNA (and optionally to not match at least one core dinucleotide of a non-target recognition sequence in the genomic DNA).
   96. The system, cell, method, isolated recombinase polypeptide, or isolated nucleic acid of any of the preceding embodiments, wherein one or more of the core sequences of the insert DNA comprises a core dinucleotide that has been altered to match a core dinucleotide of a recognition sequence occurring within a nucleotide sequence in the LeftRegion or RightRegion columns of Table 2A, 2B, or 2C (and optionally to not match at least one core dinucleotide of a non-target recognition sequence occurring within a nucleotide sequence in the LeftRegion or RightRegion columns of Table 2A, 2B, or 2C).
   100. The system or method of any of the preceding embodiments, wherein the nucleic acid encoding the recombinase polypeptide is in a viral vector, e.g., an AAV vector.
   101. The system or method of any of the preceding embodiments, wherein the double-stranded insert DNA is in a viral vector, e.g., an AAV vector.
   102. The system or method of any of the preceding embodiments, wherein the nucleic acid encoding the recombinase polypeptide is an mRNA, wherein optionally the mRNA is in an LNP.
   103. The system or method of any of the preceding embodiments, wherein the double-stranded insert DNA is not in a viral vector, e.g., wherein the double-stranded insert DNA is naked DNA or DNA in a transfection reagent.
   104. The system or method of any of the preceding embodiments, wherein:

[0099] the nucleic acid encoding the recombinase polypeptide is in a first viral vector, e.g., a first AAV vector, and

[0100] the insert DNA is in a second viral vector, e.g., a second AAV vector.

105. The system or method of any of the preceding embodiments, wherein:

[0101] the nucleic acid encoding the recombinase polypeptide is an mRNA, wherein optionally the mRNA is in an LNP, and

[0102] the insert DNA is in a viral vector, e.g., an AAV vector.

106. The system or method of any of the preceding embodiments, wherein:

[0103] the nucleic acid encoding the recombinase polypeptide is an mRNA, and

[0104] the double-stranded insert DNA is not in a viral vector, e.g., wherein the double-stranded insert DNA is naked DNA or DNA in a transfection reagent.

107. The system or method of any of the preceding embodiments, wherein the insert DNA has a length of at least 1 kb, 2 kb, 3 kb, 4 kb, 5 kb, 6 kb, 7 kb, 8 kb, 9 kb, 10 kb, 20 kb, 30 kb, 40 kb, 50 kb, 60 kb, 70 kb, 80 kb, 90 kb, 100 kb, 110 kb, 120 kb, 130 kb, 140 kb, or 150 kb.
108. The system or method of any of the preceding embodiments, wherein the insert DNA does not comprise an antibiotic resistance gene or any other bacterial genes or parts.
R1. The system, kit, polypeptide, or reaction mixture of any of the preceding embodiments, wherein the system comprises one or more circular RNA molecules (circRNAs).
R2. The system, kit, polypeptide, or reaction mixture of embodiment R1, wherein the circRNA encodes the Gene Writer polypeptide.
R3. The system, kit, polypeptide, or reaction mixture of any of embodiments R1-R2A, wherein circRNA is delivered to a host cell.
R4. The system, kit, polypeptide, or reaction mixture of any of the preceding embodiments, wherein the circRNA is capable of being linearized, e.g., in a host cell, e.g., in the nucleus of the host cell.
R4A. The system, kit, polypeptide, or reaction mixture of any of the preceding embodiments, wherein the circRNA comprises a cleavage site.
R4A1. The system, kit, polypeptide, or reaction mixture of any embodiment R4A, wherein the circRNA further comprises a second cleavage site.
R4B. The system, kit, polypeptide, or reaction mixture of embodiment R4A or R4A1, wherein the cleavage site can be cleaved by a ribozyme, e.g., a ribozyme comprised in the circRNA (e.g., by autocleavage).
R5. The system, kit, polypeptide, or reaction mixture of any of the preceding embodiments, wherein the circRNA comprises a ribozyme sequence.
R6. The system, kit, polypeptide, or reaction mixture of embodiment R5, wherein the ribozyme sequence is capable of autocleavage, e.g., in a host cell, e.g., in the nucleus of the host cell.
R6A. The system, kit, polypeptide, or reaction mixture of any of embodiments R5-R6, wherein the ribozyme is an inducible ribozyme.
R7. The system, kit, polypeptide, or reaction mixture of any of embodiments R5-R6A wherein the ribozyme is a protein-responsive ribozyme, e.g., a ribozyme responsive to a nuclear protein, e.g., a genome-interacting protein, e.g., an epigenetic modifier, e.g., EZH2.
R8. The system, kit, polypeptide, or reaction mixture of any of embodiments R5-R7, wherein the ribozyme is a nucleic acid-responsive ribozyme.
R8A. The system, kit, polypeptide, or reaction mixture of embodiment R8, wherein the catalytic activity (e.g., autocatalytic activity) of the ribozyme is activated in the presence of a target nucleic acid molecule (e.g., an RNA molecule, e.g., an mRNA, miRNA, ncRNA, lncRNA, tRNA, snRNA, or mtRNA).
R9A. The system, kit, polypeptide, or reaction mixture of any of embodiments R5-R7, wherein the ribozyme is responsive to a target protein (e.g., an MS2 coat protein).
R9B. The system, kit, polypeptide, or reaction mixture of embodiment R8A, wherein the target protein localized to the cytoplasm or localized to the nucleus (e.g., an epigenetic modifier or a transcription factor).
R9C. The system, kit, polypeptide, or reaction mixture of any of embodiments R5-R8, wherein the ribozyme comprises the ribozyme sequence of a B2 or ALU retrotransposon, or a nucleic acid sequence having at least 85%, 90%, 95%, 96%, 97%, 98%, or 99% sequence identity thereto.
R10A. The system, kit, polypeptide, or reaction mixture of any of embodiments R5-R8, wherein the ribozyme comprises the sequence of a tobacco ringspot virus hammerhead ribozyme, or a nucleic acid sequence having at least 85%, 90%, 95%, 96%, 97%, 98%, or 99% sequence identity thereto.
R10B. The system, kit, polypeptide, or reaction mixture of any of embodiments R5-R8, wherein the ribozyme comprises the sequence of a hepatitis delta virus (HDV) ribozyme, or a nucleic acid sequence having at least 85%, 90%, 95%, 96%, 97%, 98%, or 99% sequence identity thereto.
R11. The system, kit, polypeptide, or reaction mixture of any of embodiments R5-X, wherein the ribozyme is activated by a moiety expressed in a target cell or target tissue.
R12. The system, kit, polypeptide, or reaction mixture of any of embodiments R5-X, wherein the ribozyme is activated by a moiety expressed in a target subcellular compartment (e.g., a nucleus, nucleolus, cytoplasm, or mitochondria).
R4A. The system, kit, polypeptide, or reaction mixture of any of the preceding embodiments, wherein the ribozyme is comprised in a circular RNA or a linear RNA.
M1. The system, kit, polypeptide, or reaction mixture of any of the preceding embodiments, wherein the system, polypeptide, and/or DNA encoding the same, is formulated as a lipid nanoparticle (LNP).
M2a. The system, kit, polypeptide, or reaction mixture of embodiment M1, wherein the lipid nanoparticle (or a formulation comprising a plurality of the lipid nanoparticles) lacks reactive impurities (e.g., aldehydes), or comprises less than a preselected level of reactive impurities (e.g., aldehydes).
M2. The system, kit, polypeptide, or reaction mixture of embodiment M1, wherein the lipid nanoparticle (or a formulation comprising a plurality of the lipid nanoparticles) lacks aldehydes, or comprises less than a preselected level of aldehydes.
M3. The system, kit, polypeptide, or reaction mixture of embodiment M1 or M2, wherein the lipid nanoparticle is comprised in a formulation comprising a plurality of the lipid nanoparticles.
M4. The system, kit, polypeptide, or reaction mixture of embodiment M3, wherein the lipid nanoparticle formulation is produced using one or more lipid reagents comprising less than 5%, 4%, 3%, 2%, 1%, 0.9%, 0.8%, 0.7%, 0.6%, 0.5%, 0.4%, 0.3%, 0.2%, or 0.1% total reactive impurity (e.g., aldehyde) content.
M5. The system, kit, polypeptide, or reaction mixture of embodiment M4, wherein the lipid nanoparticle formulation is produced using one or more lipid reagents comprising less than 3% total reactive impurity (e.g., aldehyde) content.
M6. The system, kit, polypeptide, or reaction mixture of any of embodiments M3-M5, wherein the lipid nanoparticle formulation is produced using one or more lipid reagents comprising less than 5%, 4%, 3%, 2%, 1%, 0.9%, 0.8%, 0.7%, 0.6%, 0.5%, 0.4%, 0.3%, 0.2%, or 0.1% of any single reactive impurity (e.g., aldehyde) species.
M7. The system, kit, polypeptide, or reaction mixture of embodiment M6, wherein the lipid nanoparticle formulation is produced using one or more lipid reagent comprising less than 0.3% of any single reactive impurity (e.g., aldehyde) species.
M8. The system, kit, polypeptide, or reaction mixture of embodiment M6, wherein the lipid nanoparticle formulation is produced using one or more lipid reagents comprising less than 0.1% of any single reactive impurity (e.g., aldehyde) species.
M9. The system, kit, polypeptide, or reaction mixture of any of embodiments M3-M8, wherein the lipid nanoparticle formulation comprises less than 5%, 4%, 3%, 2%, 1%, 0.9%, 0.8%, 0.7%, 0.6%, 0.5%, 0.4%, 0.3%, 0.2%, or 0.1% total reactive impurity (e.g., aldehyde) content.
M10. The system, kit, polypeptide, or reaction mixture of embodiment M9, wherein the lipid nanoparticle formulation comprises less than 3% total reactive impurity (e.g., aldehyde) content.
M11. The system, kit, polypeptide, or reaction mixture of any of embodiments M3-M10, wherein the lipid nanoparticle formulation comprises less than 5%, 4%, 3%, 2%, 1%, 0.9%, 0.8%, 0.7%, 0.6%, 0.5%, 0.4%, 0.3%, 0.2%, or 0.1% of any single reactive impurity (e.g., aldehyde) species.
M12. The system, kit, polypeptide, or reaction mixture of embodiment M11, wherein the lipid nanoparticle formulation comprises less than 0.3% of any single reactive impurity (e.g., aldehyde) species.
M13. The system, kit, polypeptide, or reaction mixture of embodiment M11, wherein the lipid nanoparticle formulation comprises less than 0.1% of any single reactive impurity (e.g., aldehyde) species.
M14. The system, kit, polypeptide, or reaction mixture of any of embodiments M1-M13, wherein one or more, or optionally all, of the lipid reagents used for a lipid nanoparticle as described herein or a formulation thereof comprise less than 5%, 4%, 3%, 2%, 1%, 0.9%, 0.8%, 0.7%, 0.6%, 0.5%, 0.4%, 0.3%, 0.2%, or 0.1% total reactive impurity (e.g., aldehyde) content.
M15. The system, kit, polypeptide, or reaction mixture of embodiment M14, wherein one or more, or optionally all, of the lipid reagents used for a lipid nanoparticle as described herein or a formulation thereof comprise less than 3% total reactive impurity (e.g., aldehyde) content.
M16. The system, kit, polypeptide, or reaction mixture of any of embodiments M1-M15, wherein one or more, or optionally all, of the lipid reagents used for a lipid nanoparticle as described herein or a formulation thereof comprise less than 5%, 4%, 3%, 2%, 1%, 0.9%, 0.8%, 0.7%, 0.6%, 0.5%, 0.4%, 0.3%, 0.2%, or 0.1% of any single reactive impurity (e.g., aldehyde) species.
M17. The system, kit, polypeptide, or reaction mixture of embodiment M16, wherein one or more, or optionally all, of the lipid reagents used for a lipid nanoparticle as described herein or a formulation thereof comprise less than 0.3% of any single reactive impurity (e.g., aldehyde) species.
M18. The system, kit, polypeptide, or reaction mixture of embodiment M16, wherein one or more, or optionally all, of the lipid reagents used for a lipid nanoparticle as described herein or a formulation thereof comprise less than 0.1% of any single reactive impurity (e.g., aldehyde) species.
M19. The system, kit, polypeptide, or reaction mixture of any of embodiments M1-M18, wherein the total aldehyde content and/or quantity of any single reactive impurity (e.g., aldehyde) species is determined by liquid chromatography (LC), e.g., coupled with tandem mass spectrometry (MS/MS), e.g., according to the method described in Example 26.
M20. The system, kit, polypeptide, or reaction mixture of any of embodiments M1-M18, wherein the total aldehyde content and/or quantity of reactive impurity (e.g., aldehyde) species is determined by detecting one or more chemical modifications of a nucleic acid molecule (e.g., as described herein) associated with the presence of reactive impurities (e.g., aldehydes), e.g., in the lipid reagents.
M21. The system, kit, polypeptide, or reaction mixture of any of embodiments M1-M18, wherein the total aldehyde content and/or quantity of aldehyde species is determined by detecting one or more chemical modifications of a nucleotide or nucleoside (e.g., a ribonucleotide or ribonucleoside, e.g., comprised in or isolated from a nucleic acid molecule, e.g., as described herein) associated with the presence of reactive impurities (e.g., aldehydes), e.g., in the lipid reagents, e.g., as described in Example 27.
M22. The system, kit, polypeptide, or reaction mixture of embodiment M21, wherein the chemical modifications of a nucleic acid molecule, nucleotide, or nucleoside are detected by determining the presence of one or more modified nucleotides or nucleosides, e.g., using LC-MS/MS analysis, e.g., as described in Example 27.
T1. A lipid nanoparticle (LNP) comprising the system, polypeptide (or RNA encoding the same), nucleic acid molecule, or DNA encoding the system or polypeptide, of any preceding embodiment.
T2. A system comprising a first lipid nanoparticle comprising the polypeptide (or DNA or RNA encoding the same) of a Gene Writing system (e.g., as described herein); and

[0105] a second lipid nanoparticle comprising a nucleic acid molecule of a Gene Writing System (e.g., as described herein).

T3. The system, kit, polypeptide, or reaction mixture of any preceding embodiment, wherein the system, nucleic acid molecule, polypeptide, and/or DNA encoding the same, is formulated as a lipid nanoparticle (LNP).
U1. The system, kit, polypeptide, or reaction mixture of any preceding embodiment, wherein the serine recombinase comprises at least one active site signature of a serine recombinase, e.g., cd00338, cd03767, cd03768, cd03769, or cd03770.
U2. The system, kit, polypeptide, or reaction mixture of any preceding embodiment, wherein the serine recombinase comprises a domain identified from a publicly available database (e.g, InterPro, UniProt, or the conserved domain database (as described by Lu et al. Nucleic Acids Res 48, D265-268 (2020); incorporated by reference herein in its entirety)), e.g., as described herein.
U3. The system, kit, polypeptide, or reaction mixture of any preceding embodiment, wherein the serine recombinase comprises a domain identified by scanning open reading frames or all-frame translations of nucleic acid sequences for serine recombinase domains (e.g., as described herein), e.g., using a prediction tool, e.g., InterProScan, e.g., as described herein.
V0. The system, kit, polypeptide, cell (e.g., cell made by a method herein), method, or reaction mixture of any preceding embodiment, wherein the heterologous object sequence is in (e.g., is inserted into) a target site in the genome of the cell, wherein optionally the target site comprises, in order, (i) a first parapalindromic sequence (e.g., an attL site), (ii) a heterologous object sequence, and (iii) a second parapalindromic sequence (e.g., an attR site).
V1. The system, kit, polypeptide, cell, method, or reaction mixture embodiment V0, wherein the cell (e.g., the cell made by a method herein) comprises an insertion or deletion between (i) the first parapalindromic sequence, and (ii) the heterologous object sequence, or wherein the cell comprises an insertion or deletion between (ii) the heterologous object sequence and (iii) the second parapalindromic sequence.
V3. The system, kit, polypeptide, cell, method, or reaction mixture of embodiment V1, wherein the insertion or deletion comprises less than 20 nucleotides or base pairs, e.g., less than 20, 19, 18, 17, 16, 15, 14, 13, 12, 11, 10, 9, 8, 7, 6, 5, 4, 3, 2, or less than 1 nucleotides or base pairs of the nucleic acid sequence of the target site.
V4. The system, kit, polypeptide, cell, method, or reaction mixture of embodiment V1, wherein the insertion comprises less than 20 nucleotides or base pairs, e.g., less than 20, 19, 18, 17, 16, 15, 14, 13, 12, 11, 10, 9, 8, 7, 6, 5, 4, 3, 2, or less than 1 nucleotides or base pairs.
V5. The system, kit, polypeptide, cell, method, or reaction mixture of embodiment V1, wherein the deletion comprises less than 20 nucleotides or base pairs, e.g., less than 20, 19, 18, 17, 16, 15, 14, 13, 12, 11, 10, 9, 8, 7, 6, 5, 4, 3, 2, or less than 1 nucleotides or base pairs of the prior sequence of the target site.
V6. The system, kit, polypeptide, cell, method, or reaction mixture of any of embodiments V0-V5, wherein a core region, (e.g., a central dinucleotide) of a recognition sequence at a target site (e.g., an attB, attP, or pseudosite thereof, e.g., as listed in Table 4X) comprises about 95%, 96%, 97%, 98%, 99%, or 100% identity to a core region (e.g., a central dinucleotide) of a recognition sequence (e.g., an attP or attB site, e.g., as listed in Table 4X, on the insert DNA).
V7. The system, kit, polypeptide, cell, method, or reaction mixture of embodiment V6, wherein the number of insertions or deletions in the target site is lower than the number of insertions or deletions in an otherwise similar cell wherein the percent identity is lower.
V8. The system, kit, polypeptide, cell, method, or reaction mixture of embodiment V7, wherein the number of insertion or deletion events is at least 1.1, 1.2, 1.3, 1.4, 1.5, 1.6, 1.7, 1.8, 1.9, 2.0, 3.0, 4.0, 5.0, 10, 20, 30, 40, 50, 60, 70, 80, 90, or at least 100-fold lower.
V9. The system, kit, polypeptide, cell, method, or reaction mixture of any of embodiments V0-V8, wherein the target site does not comprise a plurality of insertions (e.g., head-to-tail or head-to-head duplications).
V9a. The system, kit, polypeptide, cell, method, or reaction mixture of any of embodiments V0-V9, wherein the target site comprises less than 100, 75, 50, 45, 40, 35, 30, 25, 20, 15, 14, 13, 12, 11, 10, 9, 8, 7, 6, 5, 4, 3, or 2 copies of the heterologous object sequence or a fragment thereof.
V10. The system, kit, polypeptide, cell, method, or reaction mixture of any of embodiments V0-V9a, wherein the target site comprises a single copy of the heterologous object sequence or a fragment thereof.
V11. The system, kit, polypeptide, cell, method, or reaction mixture of any of embodiments V0-V10, wherein (e.g., in a population of cells), target sites showing more than one copy of the heterologous object sequence or fragment thereof are less than 95%, 90%, 80%, 70%, 60%, 50%, 40%, 30%, 20%, 10%, 9%, 8%, 7%, 6%, 4%, 4%, 3%, 2%, or 1% of target sites comprising at least one copy of the heterologous object sequence or fragment thereof.
V12. The system, kit, polypeptide, cell, method, or reaction mixture of any of embodiments V0-V11, wherein (e.g., in a population of cells), target sites showing more than 2 copies of the heterologous object sequence or fragment thereof are less than 95%, 90%, 80%, 70%, 60%, 50%, 40%, 30%, 20%, 10%, 9%, 8%, 7%, 6%, 4%, 4%, 3%, 2%, or 1% of target sites comprising at least one copy of the heterologous object sequence or fragment thereof.
V13. The system, kit, polypeptide, cell, method, or reaction mixture of any of embodiments V0-V12, wherein (e.g., in a population of cells), target sites showing more than 3 copies of the heterologous object sequence or fragment thereof are less than 95%, 90%, 80%, 70%, 60%, 50%, 40%, 30%, 20%, 10%, 9%, 8%, 7%, 6%, 4%, 4%, 3%, 2%, or 1% of target sites comprising at least one copy of the heterologous object sequence or fragment thereof.
V14. The system, kit, polypeptide, cell, method, or reaction mixture of any of embodiments V0-V13, wherein the target site comprises one or more ITRs (e.g., AAV ITRs), e.g., 1, 2, 3, 4, or more ITRs, e.g., wherein one or more ITR is situated between (i) the first parapalindromic sequence, and (iii) the second parapalindromic sequence.
V15. The system, kit, polypeptide, cell, method, or reaction mixture of embodiment V14, wherein (e.g., in a population of cells), target sites comprising an ITR (e.g., an AAV ITR) between (i) the first parapalindromic sequence, and (iii) the second parapalindromic sequence are at least 1%, 5%, 10%, 20%, 30%, 40%, 50%, 60%, 70%, 80%, or 90% of target sites comprising at least one copy of the heterologous object sequence or fragment thereof.
V16. The system, kit, polypeptide, cell, method, or reaction mixture of embodiment V14 or V15, wherein the insert site comprises one or more copies of the heterologous object sequence or fragment thereof.
V17. The system, kit, polypeptide, cell, method, or reaction mixture of any of embodiments V0-V16, wherein the target site comprises, in order, (i) the first parapalindromic sequence, and (ii) the heterologous object sequence.
V18. The system, kit, polypeptide, cell, method, or reaction mixture of embodiment V17, wherein the target site does not comprise (iii) a second parapalindromic sequence.
V19. The system, kit, polypeptide, cell, method, or reaction mixture of any of embodiments V0-V17, wherein the target site comprises (iii) the second parapalindromic sequence, wherein (ii) is situated between (i) and (iii).
V20. The system, kit, polypeptide, cell, method, or reaction mixture of any of embodiments V0-V19, wherein (e.g., in a population of cells), target sites that comprise both of (i) the first parapalindromic sequence and (iii) the third parapalindromic sequence comprise a higher percentage of complete heterologous object sequences (e.g., at least 0.1×, 0.2×, 0.3×, 0.4×, 0.5×, 0.6×, 0.7×, 0.8×, 0.9×, 1.0×, 1.5×, 2.0×, 3×, 4×, 5×, 6×, 7×, 8×, 9×, 10× or more percent complete heterologous object sequences), as compared to the percentage of target sites that comprise one or fewer parapalindromic sequences (e.g., attL or attP sequences).

[0106] The disclosure contemplates all combinations of any one or more of the foregoing aspects and/or embodiments, as well as combinations with any one or more of the embodiments set forth in the detailed description and examples.

### Definitions

[0107] About, approximately: “About” or “approximately” as the terms are used herein applied to one or more values of interest, refer to a value that is similar to a stated reference value. In certain embodiments, the term “approximately” or “about” refers to a range of values that fall within 15%, 14%, 13%, 12%, 11%, 10%, 9%, 8%, 7%, 6%, 5%, 4%, 3%, 2%, 1%, or less in either direction (greater than or less than) of the stated reference value unless otherwise stated or otherwise evident from the context (except where such number would exceed 100% of a possible value).

[0108] Domain: The term “domain” as used herein refers to a structure of a biomolecule that contributes to a specified function of the biomolecule. A domain may comprise a contiguous region (e.g., a contiguous sequence) or distinct, non-contiguous regions (e.g., non-contiguous sequences) of a biomolecule. Examples of protein domains include, but are not limited to, a nuclear localization sequence, a recombinase domain, a DNA recognition domain (e.g., that binds to or is capable of binding to a recognition site, e.g. as described herein), a recombinase N-terminal domain (also called the catalytic domain), a recombinase domain, a C-terminal zinc ribbon domain, and domains listed in Table 4. In some embodiments the zinc ribbon domain further comprises a coiled-coiled motif. In some embodiments the recombinase domain and the zinc ribbon domain are collectively referred to as the C-terminal domain. In some embodiments the N-terminal domain is linked to the C-terminal domain by an αE linker or helix. In some embodiments the N-terminal domain is between 50 and 250 amino acids, or 100-200 amino acids, or 130-170 amino acids, e.g., about 150 amino acids. In some embodiments the C-terminal domain is 200-800 amino acids, or 300-500 amino acids. In some embodiments the recombinase domain is between 50 and 150 amino acids. In some embodiments the zinc ribbon domain is between 30 and 100 amino acids; an example of a domain of a nucleic acid is a regulatory domain, such as a transcription factor binding domain, a recognition sequence, an arm of a recognition sequence (e.g. a 5′ or 3′ arm), a core sequence, or an object sequence (e.g., a heterologous object sequence). In some embodiments, a recombinase polypeptide comprises one or more domains (e.g., a recombinase domain, or a DNA recognition domain) of a polypeptide of Table 3A, 3B, or 3C, or a fragment or variant thereof.

[0109] Exogenous: As used herein, the term exogenous, when used with reference to a biomolecule (such as a nucleic acid sequence or polypeptide) means that the biomolecule was introduced into a host genome, cell or organism by the hand of man. For example, a nucleic acid that is as added into an existing genome, cell, tissue or subject using recombinant DNA techniques or other methods is exogenous to the existing nucleic acid sequence, cell, tissue or subject.

[0110] Genomic safe harbor site (GSH site): A genomic safe harbor site is a site in a host genome that is able to accommodate the integration of new genetic material, e.g., such that the inserted genetic element does not cause significant alterations of the host genome posing a risk to the host cell or organism. A GSH site generally meets 1, 2, 3, 4, 5, 6, 7, 8 or 9 of the following criteria: (i) is located >300 kb from a cancer-related gene; (ii) is >300 kb from a miRNA/other functional small RNA; (iii) is >50 kb from a 5′ gene end; (iv) is >50 kb from a replication origin; (v) is >50 kb away from any ultraconserved element; (vi) has low transcriptional activity (i.e. no mRNA+/−25 kb); (vii) is not in a copy number variable region; (viii) is in open chromatin; and/or (ix) is unique, with 1 copy in the human genome. Examples of GSH sites in the human genome that meet some or all of these criteria include (i) the adeno-associated virus site 1 (AAVS1), a naturally occurring site of integration of AAV virus on chromosome 19; (ii) the chemokine (C—C motif) receptor 5 (CCR5) gene, a chemokine receptor gene known as an HIV-1 coreceptor; (iii) the human ortholog of the mouse Rosa26 locus; (iv) the rDNA locus. Additional GSH sites are known and described, e.g., in Pellenz et al. epub Aug. 20, 2018 (https://doi.org/10.1101/396390).

[0111] Heterologous: The term heterologous, when used to describe a first element in reference to a second element means that the first element and second element do not exist in nature disposed as described. For example, a heterologous polypeptide, nucleic acid molecule, construct or sequence refers to (a) a polypeptide, nucleic acid molecule or portion of a polypeptide or nucleic acid molecule sequence that is not native to a cell in which it is expressed, (b) a polypeptide or nucleic acid molecule or portion of a polypeptide or nucleic acid molecule that has been altered or mutated relative to its native state, or (c) a polypeptide or nucleic acid molecule with an altered expression as compared to the native expression levels under similar conditions. For example, a heterologous regulatory sequence (e.g., promoter, enhancer) may be used to regulate expression of a gene or a nucleic acid molecule in a way that is different than the gene or a nucleic acid molecule is normally expressed in nature. In certain embodiments, a heterologous nucleic acid molecule may exist in a native host cell genome, but may have an altered expression level or have a different sequence or both. In other embodiments, heterologous nucleic acid molecules may not be endogenous to a host cell or host genome but instead may have been introduced into a host cell by transformation (e.g., transfection, electroporation), wherein the added molecule may integrate into the host genome or can exist as extra-chromosomal genetic material either transiently (e.g., mRNA) or semi-stably for more than one generation (e.g., episomal viral vector, plasmid or other self-replicating vector).

[0112] Mutation or Mutated: The term “mutated” when applied to nucleic acid sequences means that nucleotides in a nucleic acid sequence may be inserted, deleted or changed compared to a reference (e.g., native) nucleic acid sequence. A single alteration may be made at a locus (a point mutation) or multiple nucleotides may be inserted, deleted or changed at a single locus. In addition, one or more alterations may be made at any number of loci within a nucleic acid sequence. A nucleic acid sequence may be mutated by any method known in the art.

[0113] Nucleic acid molecule: Nucleic acid molecule refers to both RNA and DNA molecules including, without limitation, cDNA, genomic DNA and mRNA, and also includes synthetic nucleic acid molecules, such as those that are chemically synthesized or recombinantly produced, such as DNA templates, as described herein. The nucleic acid molecule can be double-stranded or single-stranded, circular or linear. If single-stranded, the nucleic acid molecule can be the sense strand or the antisense strand. Unless otherwise indicated, and as an example for all sequences described herein under the general format “SEQ ID NO:,” “nucleic acid comprising SEQ ID NO:1” refers to a nucleic acid, at least a portion which has either (i) the sequence of SEQ ID NO:1, or (ii) a sequence complimentary to SEQ ID NO:1. The choice between the two is dictated by the context in which SEQ ID NO:1 is used. For instance, if the nucleic acid is used as a probe, the choice between the two is dictated by the requirement that the probe be complimentary to the desired target. Nucleic acid sequences of the present disclosure may be modified chemically or biochemically or may contain non-natural or derivatized nucleotide bases, as will be readily appreciated by those of skill in the art. Such modifications include, for example, labels, methylation, substitution of one or more naturally occurring nucleotides with an analog, inter-nucleotide modifications such as uncharged linkages (for example, methyl phosphonates, phosphotriesters, phosphoramidates, carbamates, etc.), charged linkages (for example, phosphorothioates, phosphorodithioates, etc.), pendant moieties, (for example, polypeptides), intercalators (for example, acridine, psoralen, etc.), chelators, alkylators, and modified linkages (for example, alpha anomeric nucleic acids, etc.). Also included are synthetic molecules that mimic polynucleotides in their ability to bind to a designated sequence via hydrogen bonding and other chemical interactions. Such molecules are known in the art and include, for example, those in which peptide linkages substitute for phosphate linkages in the backbone of a molecule. Other modifications can include, for example, analogs in which the ribose ring contains a bridging moiety or other structure such as modifications found in “locked” nucleic acids.

[0114] Gene expression unit: a gene expression unit is a nucleic acid sequence comprising at least one regulatory nucleic acid sequence operably linked to at least one effector sequence. A first nucleic acid sequence is operably linked with a second nucleic acid sequence when the first nucleic acid sequence is placed in a functional relationship with the second nucleic acid sequence. For instance, a promoter or enhancer is operably linked to a coding sequence if the promoter or enhancer affects the transcription or expression of the coding sequence. Operably linked DNA sequences may be contiguous or non-contiguous. Where necessary to join two protein-coding regions, operably linked sequences may be in the same reading frame.

[0115] Host: The terms host genome or host cell, as used herein, refer to a cell and/or its genome into which protein and/or genetic material has been introduced. It should be understood that such terms are intended to refer not only to the particular subject cell and/or genome, but to the progeny of such a cell and/or the genome of the progeny of such a cell. Because certain modifications may occur in succeeding generations due to either mutation or environmental influences, such progeny may not, in fact, be identical to the parent cell, but are still included within the scope of the term “host cell” as used herein. A host genome or host cell may be an isolated cell or cell line grown in culture, or genomic material isolated from such a cell or cell line, or may be a host cell or host genome which composing living tissue or an organism. In some instances, a host cell may be an animal cell or a plant cell, e.g., as described herein. In certain instances, a host cell may be a bovine cell, horse cell, pig cell, goat cell, sheep cell, chicken cell, or turkey cell. In certain instances, a host cell may be a corn cell, soy cell, wheat cell, or rice cell.

[0116] Recombinase polypeptide: As used herein, a recombinase polypeptide refers to a polypeptide having the functional capacity to catalyze a recombination reaction of a nucleic acid molecule (e.g., a DNA molecule). A recombination reaction may include, for example, one or more nucleic acid strand breaks (e.g., a double-strand break), followed by joining of two nucleic acid strand ends (e.g., sticky ends). In some instances, the recombination reaction comprises insertion of an insert nucleic acid, e.g., into a target site, e.g., in a genome or a construct. In some instances, the recombination reaction comprises flipping or reversing of a nucleic acid, e.g., in a genome or a construct. In some instances, the recombination reaction comprises removing a nucleic acid, e.g., from a genome or a construct. In some instances, a recombinase polypeptide comprises one or more structural elements of a naturally occurring recombinase (e.g., a serine recombinase, e.g., PhiC31 recombinase or Gin recombinase). In certain instances, a recombinase polypeptide comprises an amino acid sequence having at least 70%, 75%, 80%, 85%, 90%, 95%, 96%, 97%, 98%, 99%, or 100% sequence identity to a recombinase described herein (e.g., as listed in Table 3A, 3B, or 3C). In some embodiments, a recombinase polypeptide comprises a serine recombinase, e.g., a serine integrase. In some embodiments, a serine recombinase, e.g., a serine integrase, comprises one or more (e.g., all) of a recombinase domain, a catalytic domain, or a zinc ribbon domain. In some embodiments, a serine recombinase, e.g., a serine integrase, comprises a domain listed in Table 4 (e.g., either in addition to or in replacement of one or more of a recombinase domain, a catalytic domain, or a zinc ribbon domain). In some instances, a recombinase polypeptide has one or more functional features of a naturally occurring recombinase (e.g., a serine recombinase, e.g., PhiC31 recombinase or Gin recombinase). In some embodiments, a recombinase polypeptide is 350-900 amino acids, or 425-700 amino acids. In some instances, a recombinase polypeptide recognizes (e.g., binds to) a recognition sequence in a nucleic acid molecule (e.g., a recognition sequence occurring in a sequence in the LeftRegion and/or RightRegion columns of Table 2A, 2B, or 2C, or a sequence having at least 70%, 75%, 80%, 85%, 90%, 95%, 96%, 97%, 98%, or 99% identity thereto). In some embodiments, the recombinase may facilitate recombination between a first recognition sequence (e.g. attB or pseudo-attB) and a second genomic recognition sequence (e,g. attP or pseudo attP). In some embodiments, a recombinase polypeptide is not active as an isolated monomer. In some embodiments, a recombinase polypeptide catalyzes a recombination reaction in concert with one or more other recombinase polypeptides (e.g., two or four recombinase polypeptides per recombination reaction). In some embodiments, a recombinase polypeptide is active as a dimer. In some embodiments, a recombinase assembles as a dimer at the recognition sequence. In some embodiments, a recombinase polypeptide is active as a tetramer. In some embodiments, a recombinase assembles as a tetramer at the recognition sequence. In some embodiments, a recombinase polypeptide is a recombinant (e.g., a non-naturally occurring) recombinase polypeptide. In some embodiments, a recombinant recombinase polypeptide comprises amino acid sequences derived from a plurality of recombinase polypeptides (e.g., a recombinant recombinase polypeptide comprises a first domain from a first recombinase polypeptide and a second domain from a second recombinase polypeptide).

[0117] Insert nucleic acid molecule: As used herein, an insert nucleic acid molecule (e.g., an insert DNA) is a nucleic acid molecule (e.g., a DNA molecule) that is or will be inserted, at least partially, into a target site within a target nucleic acid molecule (e.g., genomic DNA). An insert nucleic acid molecule may include, for example, a nucleic acid sequence that is heterologous relative to the target nucleic acid molecule (e.g., the genomic DNA). In some instances, an insert nucleic acid molecule comprises an object sequence (e.g., a heterologous object sequence). In some instances, an insert nucleic acid molecule comprises a DNA recognition sequence, e.g., a cognate to a DNA recognition sequence present in a target nucleic acid. In some embodiments, the insert nucleic acid molecule is circular, and in some embodiments, the insert nucleic acid molecule is linear. In some embodiments, an insert nucleic acid molecule comprises two or more DNA recognition sequences (e.g., two DNA recognition sequences), e.g., each a cognate to a DNA recognition sequence present in a target nucleic acid. In some embodiments, an insert nucleic acid molecule is also referred to as a template nucleic acid molecule (e.g., a template DNA).

[0118] Recognition sequence: A recognition sequence (e.g., DNA recognition sequence) generally refers to a nucleic acid (e.g., DNA) sequence that is recognized (e.g., capable of being bound by) a recombinase polypeptide, e.g., as described herein. In some instances, a recognition sequence comprises two recognition sequences, one that is positioned in the integration site (the site into which a nucleic acid is to be integrated) and another adjacent a nucleic acid of interest to be introduced into the integration site. The recognition sequences are generically referred to as attB and attP. Recognition sequences can be native or altered relative to a native sequence. The recognition sequence may vary in length, but typically ranges from about 20 to about 200 nt, from about 30 to 90 nt, more usually from 30 to 70 nucleotides. The recognition sequences are typically arranged as follows: AttB comprises a first DNA sequence attB5′, a core region, and a second DNA sequence attB3′, in the relative order from 5′ to 3′ attB5′-core region-attB3′. AttP comprises a first DNA sequence attP5′, a core region, and a second DNA sequence attP3′, in the relative order from 5′ to 3′ attP5′-core region-attP3′. In some embodiments, the attB5′ and attB3′ are parapalindromic (e.g., one sequence is a palindrome relative to the other sequence or has at least 20%, 30%, 40%, 50%, 60%, 70%, 75%, 80%, 85%, 90%, 95%, 96%, 97%, 98%, or 99% sequence identity to a palindrome relative to the other sequence). In some embodiments, the attP5′ and attP3′ recognition sequences are parapalindromic (e.g., one sequence is a palindrome relative to the other sequence or has at least 20%, 30%, 40%, 50%, 60%, 70%, 75%, 80%, 85%, 90%, 95%, 96%, 97%, 98%, or 99% sequence identity to a palindrome relative to the other sequence). In some embodiments the attB5′ and attB3′ recognition sequences are parapalindromic to each other and the attP5′ and attP3′ recognition sequences are parapalindromic to each other. In some embodiments, the attB5′ and attB3′, and the attP5′ and attP3′ sequences are similar but not necessarily the same number of nucleotides. Because attB and attP are different sequences, recombination will result in a stretch of nucleic acids (called attL or attR for left and right) that is neither an attB sequence or an attP sequence. Without wishing to be bound by theory, the dissimilarities between attL/attR and attB/attP probably make attL and attR sites less unrecognizable as a recombination site to the relevant recombinase enzyme, thus reducing the possibility that the enzyme will catalyze a second recombination reaction that would reverse the first. Recognition sequences are typically bound by a recombinase dimer. In some embodiments, one or more of the αE helix, the recombinase domain, the linker domain, and/or the zinc ribbon domain of the recombinase polypeptide contact the recognition sequence. In some instances, a recognition sequence comprises a nucleic acid sequence occurring within a sequence in the LeftRegion or RightRegion columns of Table 2A, 2B, or 2C, e.g., a 20-200 nt sequence within a sequence in the LeftRegion or RightRegion columns of Table 2A, 2B, or 2C, e.g., a 30-70 nt sequence within a sequence in the LeftRegion or RightRegion columns of Table 2A, 2B, or 2C, or a sequence having at least 50%, 60%, 70%, 75%, 80%, 85%, 90%, 95%, 96%, 97%, 98%, or 99% identity thereto. In some embodiments, a recognition sequence is also referred to as an attachment site. In some embodiments, a recognition sequence is referred to as a target sequence or target site when describing the recognition sequence that occurs in the genome and is the site of Gene Writing activity.

[0119] Pseudo-Recognition Sequence: Recognition sequences exist in the genomes of a variety of organisms, where the recognition sequence does not necessarily have a nucleotide sequence identical to the wild-type recognition sequences (for a given recombinase); but such native recognition sequences are nonetheless sufficient to promote recombination meditated by the recombinase. Such recognition sequences are among those referred to herein as “pseudo-recognition sequences.” A “pseudo-recognition sequence” is a DNA sequence comprising a recognition sequence that is recognized (e.g., capable of being bound by) by a recombinase enzyme, where the recognition sequence: differs in one or more nucleotides from the corresponding wild-type recombinase recognition sequence, and/or is present as an endogenous sequence in a genome that differs from the sequence of a genome where the wild-type recognition sequence for the recombinase resides. In some embodiments, for a given recombinase, a pseudo-recognition sequence is functionally equivalent to a wild-type recombination sequence, occurs in an organism other than that in which the recombinase is found in nature, and may have sequence variation relative to the wild type recognition sequences. “Pseudo attP site” or “pseudo attB site” refer to pseudo-recognition sequences that are similar to the recognition sequences for wild-type phage (attP) or bacterial (attB) attachment site sequences, respectively, e.g., for phage integrase enzymes, such as the phage PhiC31. In some embodiments the attP or pseudo attP site is present in the genome of a host cell, while the attB or pseudo attB site is present on a targeting vector in a system described herein. In some embodiments the attB or pseudo attB site is present in the genome of a host cell, while the attP or pseudo attP site is present on a targeting vector in a system described herein. “Pseudo att site” is a more general term that can refer to either a pseudo attP site or a pseudo attB site. An att site or pseudo att site may be present on a linear or a circular nucleic acid molecule. Identification of pseudo-recognition sequences can be accomplished, for example, by using sequence alignment and analysis, where the query sequence is the recognition sequence of interest (for example an attB and/or attP of a phage/bacterial system). For example: if a genomic recognition sequence is identified using an attB query sequence, then it is said to be a pseudo-attB site; if a genomic recognition sequence is identified using an attP query sequence, then it is said to be a pseudo-attP site. In some embodiments, the pseudo-recognition sequences share high sequence similarity with wild-type recognition sequences recognized by (e.g., capable of binding to) the recombinase (e.g. one or more of the αE helix, recombinase domain, the linker domain, and/or the zinc ribbon domain as described in Li H et al., 2018, J Mol Biol, 430(21): 4401-4418, which is incorporated by reference). In some embodiments, pseudo-recognition sequences are more strongly bound or acted upon by a recombinases than the wild type recognition sequence of the recombinase. A pseudo-recognition sequence may also be referred to as a “pseudosite.” In some embodiments, a pseudosite may be quite divergent from a parental sequence, e.g., as described in Thyagarajan et al Mol Cell Biol 21(12):3926-3934 (2001). In some embodiments, a pseudosite as used herein may be less than 70%, e.g., less than 70%, 60%, 50%, 40%, or less than 30% identical to a native recognition sequence. In some embodiments, a pseudosite as used herein may be more than 20%, e.g., more than 20%, 30%, 40%, 50%, 60%, or more than 70% identical to a native recognition sequence.

[0120] Hybrid-Recognition Sequence: “Hybrid-recognition sequence” as used herein refers to a recognition sequence constructed from portions of a plurality of recognition sequences, e.g., wild type and/or pseudo-recognition sequences. In some embodiments, the plurality of recognition sequences are all recognition sequences of the same recombinase (e.g., a wild-type recognition sequence and pseudo-recognition sequence recognized by the same recombinase). In some embodiments, the sequence 5′ of the core sequence, e.g., the attB5′ or attP5′, of the hybrid-recombination site matches a pseudo-recognition sequence and the sequence 3′ of the core sequence, e.g., the attB3′ or attP3′, of the hybrid-recognition sequence matches a wild-type recognition sequence. In some embodiments, the sequence 5′ of the core sequence, e.g., the attB5′ or attP5′, of the hybrid-recombination site matches a wild-type recognition sequence and the sequence 3′ of the core sequence, e.g., the attB3′ or attP3′, of the hybrid-recognition sequence matches a pseudo-recognition sequence. In some embodiments, the sequence 5′ of the core sequence, e.g., the attB5′ or attP5′, of the hybrid-recombination site matches a pseudo-recognition sequence and the sequence 3′ of the core sequence, e.g., the attB3′ or attP3′, of the hybrid-recognition sequence matches a wild-type recognition sequence. In some embodiments, the hybrid-recognition sequence may be comprised of the region 5′ of the core sequence from a wild-type attB site and the region 3′ of the core sequence from a wild-type attP recognition sequence, or vice versa. Other combinations of such hybrid-recognition sequences will be evident to those having ordinary skill in the art, in view of the teachings of the present specification. In some embodiments, a recognition sequence suitable for use herein is a hybrid-recognition sequence.

[0121] Core sequence: A core sequence, as used herein, refers to a nucleic acid sequence positioned between two arms of a recognition sequences, e.g., between a pair of parapalindromic sequences. In some embodiments, a core sequence is positioned between a attB5′ and an attB3′, or between an attP5′ and an attP3′. In some instances, a core sequence can be cleaved by a recombinase polypeptide (e.g., a recombinase polypeptide that recognizes a recognition sequence comprising the two parapalindromic sequences), e.g., to form sticky ends, e.g. a 3′ overhang. In some embodiments, the core sequence of the attB and attP are identical. In some embodiments, the core sequence of the attB and attP are not identical, e.g., have less than 99, 95, 90, 80, 70, 60, 50, 40, 30, or 20% identity. In some embodiments, the core sequence is about 2-20 nucleotides, e.g., 2-16 nucleotides, e.g., about 4 nucleotides in length or about 2 nucleotides in length (e.g., exactly 2 nucleotides in length). In some embodiments, a core sequence comprises a core dinucleotide corresponding to two adjacent nucleotides wherein a recombinase recognizing the nearby parapalindromic sequences may cut the DNA on one side of the core dinucleotide, e.g., forming sticky ends. In some embodiments, the core dinucleotide of the core sequence of an attB and/or attP site are identical, e.g., cleavage of the attP and/or attB sites form compatible sticky ends. In some embodiments, a core sequence comprises a nucleic acid sequence occurring within a nucleotide sequence in the LeftRegion or RightRegion columns of Table 2A, 2B, or 2C. In some embodiments, a core sequence comprises a nucleic acid sequence not originating within a nucleotide sequence in the LeftRegion or RightRegion columns of Table 2A, 2B, or 2C.

[0122] Object sequence: As used herein, the term object sequence refers to a nucleic acid segment that can be desirably inserted into a target nucleic acid molecule, e.g., by a recombinase polypeptide, e.g., as described herein. In some embodiments, an insert DNA comprises a DNA recognition sequence and an object sequence that is heterologous to the DNA recognition sequence, generally referred to herein as a “heterologous object sequence.” An object sequence may, in some instances, be heterologous relative to the nucleic acid molecule into which it is inserted. In some instances, an object sequence comprises a nucleic acid sequence encoding a gene (e.g., a eukaryotic gene, e.g., a mammalian gene, e.g., a human gene) or other cargo of interest (e.g., a sequence encoding a functional RNA, e.g., an siRNA or miRNA), e.g., as described herein. In certain instances, the gene encodes a polypeptide (e.g., a blood factor or enzyme). In some instances, an object sequence comprises one or more of a nucleic acid sequence encoding a selectable marker (e.g., an auxotrophic marker or an antibiotic marker), and/or a nucleic acid control element (e.g., a promoter, enhancer, silencer, or insulator).

[0123] Parapalindromic: As used herein, the term “parapalindromic” refers to a property of a pair of nucleic acid sequences, wherein one of the nucleic acid sequences is either a palindrome relative to the other nucleic acid sequence, or has at least 30% (e.g., at least 30%, 35%, 40%, 45%, 50%, 55%, 60%, 65%, 70%, 75%, 80%, 85%, 90%, 95%, 96%, 97%, 98%, 99%, or 100%), e.g., at least 50%, sequence identity to a palindrome relative to the other nucleic acid sequence, or has no more than 1, 2, 3, 4, 5, 6, 7, 8, 9, 10, 11, 12, 13, 14, 15, 16, 17, 18, 19, or 20 sequence mismatches relative to the other nucleic acid sequence. “Parapalindromic sequences,” as used herein, refer to at least one of a pair of nucleic acid sequences that are parapalindromic relative to each other. A “parapalindromic region,” as used herein, refers to a nucleic acid sequence, or the portions thereof, that comprise two parapalindromic sequences. In some instances, a parapalindromic region comprises two parapalindromic sequences flanking a nucleic acid segment, e.g., comprising a core sequence.

### BRIEF DESCRIPTION OF THE DRAWINGS

[0124] FIG. 1A: Activity of 10 exemplary serine integrases in human cells. HEK293T cells were transfected with an integrase expression plasmid and a template plasmid harboring a 520 bp attP containing region followed by an EGFP reporter driven by CMV promoter. Shown are the percentage of EGFP-positive cells observed by flow cytometry at 21 days post-transfection.

[0125] FIG. 1B: Strategies to assess integration, stability, and expression of different AAV donor formats. A single attB* or attP* donor utilizes formation of double-stranded circularized DNA following AAV transduction into the cell nucleus. This configuration also includes ITR sequences post-integration. A dual attB-attB* or attP-attP* donor does not require formation of double-stranded circularized DNA following AAV transduction. The readout for integration stability and expression uses droplet digital PCR (ddPCR) and flow cytometry (FLOW).

[0126] FIG. 2: AAV constructs illustration. First line shows: ITR, stuffer (500), attP*, P_{EF1a}, EGFP, WPRE, hGHpA, ITR; AAV2 serotype. Second line shows: ITR, stuffer (500), attP, P_{EF1a}, EGFP, WPRE, hGHpA, attP*, stuffer (500), ITR; AAV2 serotype. Third line shows: ITR, stuffer (500), attB*, P_{EF1a}, EGFP, WPRE, hGHpA, ITR; AAV2 serotype. Fourth line shows: ITR, stuffer (500), attB, P_{EF1a}, EGFP, WPRE, hGHpA, attB*, stuffer (500), ITR; AAV2 serotype. Fifth line shows: ITR, P_{EF1a}, hcoBXB1, WPRE, hGHpA, ITR; AAV2 serotype. Sixth line shows: ITR, P_{EF1a}, mcoBXB1, WPRE, hGHpA, ITR; AAV6 serotype.

[0127] FIGS. 3A and 3B: Dual AAV delivery of serine integrase and template DNA to mammalian cells. (A) Schematic representation of experiment. BXB1 serine recombinase and template DNA are co-delivered as separate AAV viral vectors into BXB landing pad cell lines. (B) Droplet digital PCR (ddPCR) assay to assess integration (% CNV/landing pad) of BXB1 serine recombinase and transgene into attP-attP* landing pad cell line 3 days and 7 days post-transduction. Black dots (to the right of each pair of gray dots) indicate template only samples and fall at 0% on the y-axis. Gray dots (to the left of each pair of black dots) indicate template+BXB1 integrase and fall between 1-6% on the y-axis.

[0128] FIGS. 4A and 4B: mRNA delivery of BXB1 integrase and AAV delivery of template DNA to mammalian cells. (A) Schematic representation of experiment. mRNA delivery of BXB1 serine recombinase and AAV delivery of template DNA into BXB1 landing pad cell lines. (B) Droplet digital PCR (ddPCR) assay to assess integration (% CNV/landing pad) of BXB1 serine recombinase and transgene into attP-attP* landing pad cell line 3 days post mRNA transfection/AAV transduction. Black dots (to the right of each pair of gray dots) indicate template only samples and fall at 0% on the y-axis. Gray dots (to the left of each pair of black dots) indicate template+BXB1 integrase and fall at greater than 0% on the y-axis.

[0129] FIGS. 5A and 5B: General structure of recombinase recognition sites and presence of recognition sites in LeftRegion and RightRegion sequences disclosed herein. (A) General features of a recognition sequence. Serine recombinases as defined herein generally comprise a central dinucleotide, a core sequence, and flanking arms that may be parapalindromic in nature. Depicted here are the attP and attB recognition sequences (SEQ ID NOS 3744 and 3691, respectively) for Bxb1 recombinase (Table 3A, Line No 204). These sequences share the central dinucleotide, indicated in bold, which is important for successful recombination between the two sites. The arms of the recognition sites, indicated by black box outlines, may share palindromic sequences to a varying degree, thus being referred to as “parapalindromic” herein. Nucleotides that are palindromic with respect to the opposite arm are indicated by underlined text. Additionally, recognition sequences share a core that is common between the attP and attB site, indicated here by gray shading. The core sequence comprises the central dinucleotide at a minimum, but may include additional sequence. (B) The LeftRegion or RightRegion of Table 2 comprises the attP site for a cognate recombinase. Table 2 comprises exemplary recognition sites for exemplary recombinases described herein. As an example, the attP site for a recombinase in a Table 1 or Table 3, e.g., Table 1A or Table 3A, is found in a LeftRegion or a RightRegion in a Table 2, e.g., Table 2A. Shown here, the attP site for Bxb1 integrase (Table 1A and Table 3A, Line No 204) can be found in the corresponding row (Line No 204) of Table 2A. The attP site of Bxb1 is shown as underlined and bolded text in the LeftRegion sequence.

### DETAILED DESCRIPTION

[0130] This disclosure relates to compositions, systems and methods for targeting, editing, modifying or manipulating a DNA sequence (e.g., inserting a heterologous object DNA sequence into a target site of a mammalian genome) at one or more locations in a DNA sequence in a cell, tissue or subject, e.g., in vivo or in vitro. The object DNA sequence may include, e.g., a coding sequence, a regulatory sequence, a gene expression unit.

### Gene-Writer™ Genome Editors

[0131] The present invention provides recombinase polypeptides (e.g., serine recombinase polypeptides, e.g., as listed in Table 3A, 3B, or 3C) that can be used to modify or manipulate a DNA sequence, e.g., by recombining two DNA sequences comprising cognate recognition sequences that can be bound by the recombinase polypeptide. A Gene Writer™ gene editor system may, in some embodiments, comprise: (A) a polypeptide or a nucleic acid encoding a polypeptide, wherein the polypeptide comprises (i) a domain that contains recombinase activity, and (ii) a domain that contains DNA binding functionality (e.g., a DNA recognition domain that, for example, binds to or is capable of binding to a recognition sequence, e.g., as described herein); and (B) an insert DNA comprising (i) a sequence that binds the polypeptide (e.g., a recognition sequence as described herein) and, optionally, (ii) an object sequence (e.g., a heterologous object sequence). In some embodiments, the domain that contains recombinase activity and the domain that contains DNA binding functionality is the same domain. For example, the Gene Writer™ genome editor protein may comprise a DNA-binding domain and a recombinase domain. In certain embodiments, the elements of the Gene Writer™ gene editor polypeptide can be derived from sequences of a recombinase polypeptide (e.g., a serine recombinase), e.g., as described herein, e.g., as listed in Table 3A, 3B, or 3C. In some embodiments the Gene Writer™ genome editor is combined with a second polypeptide. In some embodiments the second polypeptide is derived from a recombinase polypeptide (e.g., a serine recombinase), e.g., as described herein, e.g., as listed in Table 3A, 3B, or 3C.

### Recombinase Polypeptide Component of Gene Writer Gene Editor System

[0132] An exemplary family of recombinase polypeptides that can be used in the systems, cells, and methods described herein includes the serine recombinases. Generally, serine recombinases are enzymes that catalyze site-specific recombination between two recognition sequences. The two recognition sequences may be, e.g., on the same nucleic acid (e.g., DNA) molecule, or may be present in two separate nucleic acid (e.g., DNA) molecules. In some embodiments, a serine recombinase polypeptide comprises a recombinase N-terminal domain (also called the catalytic domain), a recombinase domain, and a C-terminal zinc ribbon domain. In some embodiments the zinc ribbon domain further comprises a coiled-coiled motif. In some embodiments the recombinase domain and the zinc ribbon domain are collectively referred to as the C-terminal domain. In some embodiments the N-terminal domain is between 50 and 250 amino acids, or 100-200 amino acids, or 130-170 amino acids. In some embodiments the C-terminal domain is 200-800 amino acids, or 300-500 amino acids. In some embodiments the recombinase domain is between 50 and 150 amino acids. In some embodiments the zinc ribbon domain is between 30 and 100 amino acids. In some embodiments the N-terminal domain is linked to the recombinase domain via a long helix (sometimes referred to as an αE helix or linker). In some embodiments the recombinase domain and zinc ribbon domain are connected via a short linker. Non-limiting examples of serine recombinases, as well as the recombinase polypeptides, are listed in Table 3A, 3B, or 3C.

[0133] In some embodiments, recombinant recombinases are constructed by swapping domains. In some embodiments, a recombinase N-terminal domain can be paired with a heterologous recombinase C-terminal domain. In some embodiments, a catalytic domain can be paired with a heterologous recombinase domain, zinc ribbon domain, αE helix, and/or short linker. In some embodiments, a C-terminal domain can comprise heterologous recombinase domains, zinc ribbon domains, αE helix, and/or short linkers. In some embodiments, DNA binding elements of the recombinase polypeptide are modified or replaced by heterologous DNA binding elements, such as zinc-finger domains, TAL domains, or Watson-crick based targeting domains, such as CRISPR/Cas systems.

[0134] Without wishing to be bound by theory, serine recombinases utilize short, specific DNA sequences (e.g., attP and attB), which are examples of recognition sequences. During the integration reaction, the recombinase binds to attP and attB as a dimer, mediates association of the sites to form a tetrameric synaptic complex, and catalyzes strand exchange to integrate DNA, forming new recognition sequences sites, attL and attR. The new recognition sites, attL and attR, comprises, for example, in order from 5′ to 3′: attB5′-core-attP3′, and attP5′-core-attB3′. Without wishing to be bound by theory, the reverse reaction, where the DNA is excised by site-specific recombination between attL and attR sequences, occurs at reduced frequency or does not occur in the absence of a recombination directionality factor (RDF). This results in stable integration with little or no detectable recombinase-mediated excision, i.e., recombination that is “unidirectional”.

[0135] While not wishing to be bound by descriptions of mechanisms, strand exchange catalyzed by recombinases typically occurs in two steps of (1) cleavage and (2) rejoining involving a covalent protein-DNA intermediate formed between the recombinase enzyme and the DNA strand(s). The recombinases act by binding to their DNA substrates as dimers and bring the sites together by protein-protein interactions to form a tetrameric synaptic complex. Activation of the nucleophilic serine in each of the four subunits results in DNA cleavage to give 2 nt 3′ overhangs and transient phosphoseryl bonds to the recessed 5′ ends. DNA strand exchange occurs by subunit rotation. The 3′ dinucleotide overhangs base pair with the recessed 5′ bases and the 3′ OH attacks the phosphoseryl bond in the reverse of the cleavage reaction to join the recombinant half sites. Further details of the structure, activity, and biology of serine recombinases are described in the following references which are incorporated by reference: Smith M C M. 2014. Phage-encoded serine integrases and other large serine recombinases. Microbiol Spectrum 3(4):MDNA3-0059-2014; Rutherford K and Van Duyne G D. 2014. The ins and outs of serine integrase site-specific recombination. Current Opinion in Structural Biology 24: 125-131; Van Duyne G D and Rutherford K. 2013. Large Serine Recombinase domain structure and attachment site binding. Critical Reviews in Biochemistry and Molecular Biology 48(5): 471-491.

[0136] A skilled artisan can determine the nucleic acid and corresponding polypeptide sequences of a recombinase polypeptide (e.g., serine recombinase) and domains thereof, e.g., by using routine sequence analysis tools as Basic Local Alignment Search Tool (BLAST) or CD-Search for conserved domain analysis. Other sequence analysis tools are known and can be found, e.g., at molbiol-tools.ca, for example, at molbiol-tools.ca/Motifs.htm. In some embodiments, a serine recombinase described herein includes at least one known active site signature of a serine recombinase, e.g., cd00338, cd03767, cd03768, cd03769, or cd03770. Proteins containing these domains can additionally be found by searching the domains on protein databases, such as InterPro (Mitchell et al. Nucleic Acids Res 47, D351-360 (2019)), UniProt (The UniProt Consortium Nucleic Acids Res 47, D506-515 (2019)), or the conserved domain database (Lu et al. Nucleic Acids Res 48, D265-268 (2020)), or by scanning open reading frames or all-frame translations of nucleic acid sequences for serine recombinase domains using prediction tools, for example InterProScan.

[0137] While the present disclosure provides many particular serine recombinase sequences, it is understood that methods described herein can be performed with other serine recombinases as well. For example, a composition or method described herein may involve a serine recombinase having an active site signature chosen from, e.g., cd00338, cd03767, cd03768, cd03769, or cd03770. In some embodiments, the serine recombinase has a length of above 400 amino acids (e.g., at least 400, 500, 600, 700, 800, 900, or 1000 amino acids). In some embodiments, a recombinase comprises 1, 2, 3, 4, 5, 6, 7, 8, 9, 10, 11, 12, 13, 14, 15, or more domains listed in any of Tables 3A-3C (e.g., listed in a single row of any of Tables 3A-3C). In some embodiments, a recombinase comprises 1, 2, 3, 4, 5, 6, 7, 8, 9, 10, 11, 12, 13, 14, 15, or more domains listed in Table 4. In some embodiments, a method for identifying a recombinase comprises determining whether a polypeptide comprises 1, 2, 3, 4, 5, 6, 7, 8, 9, 10, 11, 12, 13, 14, 15, or more domains listed in any of Tables 3A-3C (e.g., listed in a single row of any of Tables 3A-3C). In some embodiments, a method for identifying a recombinase comprises determining whether a polypeptide comprises 1, 2, 3, 4, 5, 6, 7, 8, 9, 10, 11, 12, 13, 14, 15, or more domains listed in Table 4.

[0138] Exemplary Recombinase Polypeptides

[0139] In some embodiments, a Gene Writer™ gene editor system comprises a recombinase polypeptide (e.g., a serine recombinase polypeptide), e.g., as described herein. Generally, a recombinase polypeptide (e.g., a serine recombinase polypeptide) specifically binds to a nucleic acid recognition sequence and catalyzes a recombination reaction at a site within the recognition sequence (e.g., a core sequence within the recognition sequence). In some embodiments, a recombinase polypeptide catalyzes recombination between a recognition sequence, or a portion thereof (e.g., a core sequence thereof) and another nucleic acid sequence (e.g., an insert DNA comprising a cognate recognition sequence and, optionally, an object sequence, e.g., a heterologous object sequence). For example, a recombinase polypeptide (e.g., a serine recombinase polypeptide) may catalyze a recombination reaction that results in insertion of an object sequence, or a portion thereof, into another nucleic acid molecule (e.g., a genomic DNA molecule, e.g., a chromosome or mitochondrial DNA).

[0140] Table 3A, 3B, or 3C (see Protseq column) below provides amino acid sequences of exemplary recombinase polypeptides, e.g., serine recombinases (e.g., serine integrases), or fragments thereof. Table 2A, 2B, or 2C provides the flanking nucleic acid sequences of the nucleic acid sequence encoding the exemplary serine recombinase in the organism of origin (see columns labeled LeftRegion and RightRegion, respectively); one or both of these flanking nucleic acid sequences comprise the native recognition sequence or the portions thereof (e.g., comprise an attP site or portions thereof) of the corresponding recombinase. Table 3A, 3B, or 3C comprises amino acid sequences that had not previously been identified as serine recombinases, and Table 2A, 2B, or 2C comprises corresponding flanking nucleic acid sequences (and thereby DNA recognition sequences) of serine recombinases for which the DNA recognition sequences were previously unknown. A description of the origin sequence (see Description column of Table 1A, 1B, or 1C), the organism of origin of the recombinase (see Organism column of Table 1A, 1B, or 1C), the length of the amino acid sequence of the recombinase (see Protein Sequence Length column of Table 1A, 1B, or 1C), the genome accession number of the nucleic acid sequence encoding the recombinase (Genomic Accession column of Table 1A, 1B, or 1C), the protein accession number of the recombinase (Protein Accession column of Table 1A, 1B, or 1C), and the genomic position coordinates of the recombinase encoding sequence (including flanking nucleic acid sequences shown) (Gstart and Gstop columns of Table 1A, 1B, or 1C) are given below. Domains identified as present in the exemplary recombinase sequences are also identified based on InterPro analysis of the amino acid sequence (see Domain column of Table 3A, 3B, or 3C). See, e.g., https://omictools.com/interpro-tool. A brief key to the domain nomenclature is provided in Table 4. The amino acid sequence and genomic sequences of each accession number in Table 1A, 1B, or 1C is hereby incorporated by reference in its entirety. Each of the native recognition sequences or portions thereof occurring in the flanking nucleic acid sequences listed in Table 2A, 2B, or 2C may comprise one, two, or three of: (i) a first parapalindromic sequence, (ii) a core sequence, and/or (iii) a second parapalindromic sequence, wherein the first and second parapalindromic sequences are parapalindromic relative to each other.

[0141] In some embodiments, when selecting pairs of parapalindromic sequences, a user of the tables disclosed herein chooses each sequence based on the sequence disclosed in a row with the same line number as each other. For example, in some embodiments a cell comprising a DNA recognition sequence comprising a first parapalindromic sequence and a second parapalindromic sequence would comprise first and second parapalindromic sequences relating to sequences disclosed in the same row of Table 2A, 2B, or 2C. In some embodiments, when selecting DNA recognition sequences (e.g., parapalindromic sequences) for use with an exemplary recombinase polypeptide, the DNA recognition sequences (e.g., parapalindromic sequences) are selected from or relate to sequences in the row having the same line number as the exemplary recombinase polypeptide.

Lengthy table referenced here
US20230131847A1-20230427-T00001
Please refer to the end of the specification for access instructions.

Lengthy table referenced here
US20230131847A1-20230427-T00002
Please refer to the end of the specification for access instructions.

Lengthy table referenced here
US20230131847A1-20230427-T00003
Please refer to the end of the specification for access instructions.

Lengthy table referenced here
US20230131847A1-20230427-T00004
Please refer to the end of the specification for access instructions.

Lengthy table referenced here
US20230131847A1-20230427-T00005
Please refer to the end of the specification for access instructions.

Lengthy table referenced here
US20230131847A1-20230427-T00006
Please refer to the end of the specification for access instructions.

Lengthy table referenced here
US20230131847A1-20230427-T00007
Please refer to the end of the specification for access instructions.

Lengthy table referenced here
US20230131847A1-20230427-T00008
Please refer to the end of the specification for access instructions.

Lengthy table referenced here
US20230131847A1-20230427-T00009
Please refer to the end of the specification for access instructions.

Lengthy table referenced here
US20230131847A1-20230427-T00010
Please refer to the end of the specification for access instructions.

Lengthy table referenced here
US20230131847A1-20230427-T00011
Please refer to the end of the specification for access instructions.

[0142] In some embodiments, a sequence comprising the LeftRegion nucleic acid sequence of Line 329 of Table 2A (e.g., a sequence comprising the nucleic acid sequence of SEQ ID NO: 290) comprises the nucleic acid sequence:

(SEQ ID NO: 3800)
TCAAAGGTTGATGTTACTGCTGATAATGTAGATAT
CATATTTAAATTCCAACTCGCTTAATTGCGAGTTT
TTATTTCGTTTATTTCAATTAAGGTAACTAAAAAA
CTCCTTTTAAGGAGTTTCTGTAATCAATTAATTTC
TTCAATATATTTTATTTGGTCCCATAGTTCATCAG
TTATCTCATGCATAGAAGGTTTTTGTTTTGTTTGT
ATTAGATATCCTTTCTCCTTAAGCATGTTAACTAC
TTTCTTTAGTTTCTG.

[0143] In some embodiments, a sequence comprising the LeftRegion nucleic acid sequence of Line 524 of Table 2A (e.g., a sequence comprising the nucleic acid sequence of SEQ ID NO: 470) comprises the nucleic acid sequence:

(SEQ ID NO: 3801)
TTAATTAAAAAAATAGACGTATGGAACGATAATAA
AATTAAGATCCACTGGAATATTTAATTTTTTAGGC
GCTTTACGCCTTTTTTCGTATATTAGGTATTTCCA
ATTGAAACCGGTTATATCTAATATACGAAATTATA
CAACAAAAAGCCCCAGTGACCATTGCATAATCTGC
AACAACCACTAGGGCTAAATTTTTATTGACGTTGT
GAGTAAACAACTGAATTGAGTTGCTGTTGGTTAAC
ACCATTGGCAATATC.

[0144] In some embodiments, a recombinase recognition site (e.g., as described herein) comprises an attB sequence. In some embodiments, a recombinase recognition site (e.g., as described herein) comprises an attP sequence. In some embodiments, a recombinase recognition site (e.g., as described herein) comprises an attB sequence and an attP sequence. In embodiments, the attB sequence is selected from a sequence listed in Table 4X. In embodiments, the attP sequence is selected from a sequence listed in Table 4X. In some embodiments, a recombinase recognition site (e.g., as described herein) comprises an attB sequence and an attP sequence, wherein the attB and attP sequences each comprise a sequence as listed in a single row of Table 4X.

[0145] In some embodiments, a DNA recognition sequence (e.g., as described herein) comprises an attB sequence. In some embodiments, a DNA recognition sequence (e.g., as described herein) comprises an attP sequence. In some embodiments, a DNA recognition sequence (e.g., as described herein) comprises an attB sequence and an attP sequence. In embodiments, the attB sequence is selected from a sequence listed in Table 4X. In embodiments, the attP sequence is selected from a sequence listed in Table 4X. In some embodiments, a DNA recognition sequence (e.g., as described herein) comprises an attB sequence and an attP sequence, wherein the attB and attP sequences each comprise a sequence as listed in a single row of Table 4X.

[0146] In some embodiments, a recombinase polypeptide (e.g., comprised in a system or cell as described herein) comprises an amino acid sequence as listed in Table 3A, 3B, or 3C, or an amino acid sequence having at least 70%, 75%, 80%, 85%, 90%, 95%, 96%, 97%, 98%, 99%, or 100% sequence identity thereto. In some embodiments, a recombinase polypeptide (e.g., comprised in a system or cell as described herein), or a portion thereof, has at least 70%, 75%, 80%, 85%, 90%, 95%, 96%, 97%, 98%, 99%, or 100% sequence identity to the amino acid sequence of a recombinase domain, a DNA recognition domain (e.g., that binds to or is capable of binding to a recognition site, e.g. as described herein), a recombinase N-terminal domain (also called the catalytic domain), a zinc ribbon domain, the coiled coil motif of a zinc ribbon domain, or a C-terminal domain (e.g., the recombinase domain and the zinc ribbon domain) of a recombinase polypeptide as listed in Table 3A, 3B, or 3C. In some embodiments, a recombinase polypeptide (e.g., comprised in a system or cell as described herein) has one or more of the DNA binding activity and/or the recombinase activity of a recombinase polypeptide comprising an amino acid sequence as listed in Table 3A, 3B, or 3C, or an amino acid sequence having at least 70%, 75%, 80%, 85%, 90%, 95%, 96%, 97%, 98%, 99%, or 100% sequence identity thereto.

[0147] In some embodiments, an insert DNA (e.g., comprised in a system or cell as described herein) comprises a nucleic acid recognition sequence occurring within a nucleotide sequence in the LeftRegion or RightRegion columns of Table 2A, 2B, or 2C, or a nucleic acid sequence having at least 70%, 75%, 80%, 85%, 90%, 95%, 96%, 97%, 98%, or 99% identity thereto, or having no more than 1, 2, 3, 4, 5, 6, 7, 8, 9, 10, 11, 12, 13, 14, 15, 16, 17, 18, 19, or 20 sequence alterations (e.g., substitutions, insertions, or deletions) relative thereto. In some embodiments, an insert DNA (e.g., comprised in a system or cell as described herein) comprises one or more (e.g., both) parapalindromic sequences occurring within a nucleotide sequence in the LeftRegion or RightRegion columns of Table 2A, 2B, or 2C, or a nucleic acid sequence having at least 70%, 75%, 80%, 85%, 90%, 95%, 96%, 97%, 98%, or 99% identity to said parapalindromic sequence, or having no more than 1, 2, 3, 4, 5, 6, 7, 8, 9, 10, 11, 12, 13, 14, 15, 16, 17, 18, 19, or 20 sequence alterations (e.g., substitutions, insertions, or deletions) relative thereto. In some embodiments, an insert DNA (e.g., comprised in a system or cell as described herein) comprises a spacer (e.g., a core sequence) of a nucleic acid recognition sequence occurring within a nucleotide sequence in the LeftRegion or RightRegion columns of Table 2A, 2B, or 2C or a nucleic acid sequence having at least 70%, 75%, 80%, 85%, 90%, 95%, 96%, 97%, 98%, or 99% identity thereto, or having no more than 1, 2, 3, 4, 5, 6, 7, 8, 9, 10, 11, 12, 13, 14, 15, 16, 17, 18, 19, or 20 sequence alterations (e.g., substitutions, insertions, or deletions) relative thereto. In certain embodiments, the insert DNA further comprises a heterologous object sequence.

[0148] In some embodiments, an insert DNA (e.g., comprised in a system or cell as described herein) comprises a nucleic acid recognition sequence occurring within a nucleotide sequence in the LeftRegion or RightRegion columns of Table 2A, 2B, or 2C, or a nucleic acid sequence having at least 70%, 75%, 80%, 85%, 90%, 95%, 96%, 97%, 98%, or 99% identity thereto, or having no more than 1, 2, 3, 4, 5, 6, 7, 8, 9, 10, 11, 12, 13, 14, 15, 16, 17, 18, 19, or 20 sequence alterations (e.g., substitutions, insertions, or deletions) relative thereto, that is the cognate to a pseudo-recognition sequence (e.g., a human recognition sequence).

[0149] In some embodiments, an insert DNA or recombinase polypeptide used in a composition or method described herein directs insertion of a heterologous object sequence into a position having a safe harbor score of at least 3, 4, 5, 6, 7, or 8.

[0150] In certain embodiments, recombination between the insert DNA and the human DNA recognition sequence results in the formation of an integrated nucleic acid molecule comprising two recognition sequences flanking the integrated sequence (e.g., the heterologous object sequence). Without wishing to be bound by theory, serine recombinases facilitate recombination between recognition sequences comprising attB and attP sites and by recombination form recognition sequences comprising attL and attR sites, e.g., flanking the integrated sequence. While a serine recombinase may recognize, e.g., bind, to an attL or attR site, the serine recombinase will not appreciably (e.g., will not) facilitate recombination using the attL or attR sites (e.g., in the absence of an additional factor). The attL and attR sites comprise recombined portions of the attP and attB sites from which they were created. In certain embodiments, one or both of the two post-recombination recognition sequences of the integrated nucleic acid molecule comprises 1, 2, 3, 4, 5, 6, 7, 8, 9, 10, 11, 12, 13, 14, 15, 16, 17, 18, 19, 20, 21, 22, 23, 24, 25, 26, 27, 28, 29, 30, 31, 32, 33, 34, 35, or more mismatches as compared to one or more of (e.g., one, two, or all three of): (i) the native recognition sequence, (ii) the recognition sequence on the insert DNA, and/or (iii) a pseudo-recognition sequence (e.g., a human DNA recognition sequence). In embodiments, one or both of the two post-recombination recognition sequences of the integrated nucleic acid molecule comprises 1, 2, 3, 4, 5, 6, 7, 8, 9, 10, 11, 12, 13, 14, 15, 16, 17, 18, 19, 20, 21, 22, 23, 24, 25, 26, 27, 28, 29, 30, 31, 32, 33, 34, 35, or more mismatches as compared to the native recognition sequence. In some embodiments the mismatches are present in the core sequence. It is contemplated that, in some embodiments, these differences between the recognition sequence(s) of the integrated nucleic acid molecule and the native recognition sequence, the insert DNA recognition sequence, and/or the human DNA recognition sequence result in reduced binding affinity between the recombinase polypeptide and the recognition sequences of the integrated nucleic acid molecule and/or reduced (e.g., eliminated) recombinase activity of the recombinase polypeptide on the recognition sequences of the integrated nucleic acid molecule, compared to the binding and/or activity of the recombinase to the recognition sequence(s) the native recognition sequence, the insert DNA recognition sequence, and/or the human DNA recognition sequence.

[0151] In some embodiments, a pseudo-recognition sequence (e.g., a human DNA recognition sequence) is located in or near (e.g., within 1, 2, 3, 4, 5, 10, 15, 20, 30, 40, 50, 75, 100, 150, 200, 300, 400, 500, 600, 700, 800, 900, 1000, 2000, 3000, 4000, 5000, or 10,000 nucleotides of) a genomic safe harbor site. In some embodiments, the pseudo-recognition sequence (e.g., human recognition sequence) is located at a position in the genome that meets 1, 2, 3, 4, 5, 6, 7, 8 or 9 of the following criteria: (i) is located >300 kb from a cancer-related gene; (ii) is >300 kb from a miRNA/other functional small RNA; (iii) is >50 kb from a 5′ gene end; (iv) is >50 kb from a replication origin; (v) is >50 kb away from any ultraconserved element; (vi) has low transcriptional activity (i.e. no mRNA+/−25 kb); (vii) is not in a copy number variable region; (viii) is in open chromatin; and/or (ix) is unique, with 1 copy in the human genome.

[0152] In embodiments, a cell or system as described herein comprises one or more of (e.g., 1, 2, or 3 of): (i) a recombinase polypeptide as listed on a row with a line number X of Table 3A, 3B, or 3C or 3B (where X is any number 1 to the maximum line number of Table 3A, 3B, or 3C), or an amino acid sequence having at least 70%, 75%, 80%, 85%, 90%, 95%, 96%, 97%, 98%, 99%, or 100% sequence identity thereto; (ii) an insert DNA comprising a DNA recognition sequence occurring within a nucleotide sequence in the LeftRegion or RightRegion columns of the row with line number X of Table 2A, 2B, or 2C, or a nucleic acid sequence having at least 70%, 75%, 80%, 85%, 90%, 95%, 96%, 97%, 98%, or 99% identity thereto, or having no more than 1, 2, 3, 4, 5, 6, 7, 8, 9, 10, 11, 12, 13, 14, 15, 16, 17, 18, 19, or 20 sequence alterations (e.g., substitutions, insertions, or deletions) relative thereto, optionally wherein the insert DNA further comprises an object sequence (e.g., a heterologous object sequence); and/or (iii) a genome comprising a pseudo-recognition sequence (e.g., a human recognition sequence) sequence occurring in the sequences of the LeftRegion or RightRegion columns of Table 2A, 2B, or 2C, or a nucleic acid sequence having at least 70%, 75%, 80%, 85%, 90%, 95%, 96%, 97%, 98%, or 99% identity thereto, or having no more than 1, 2, 3, 4, 5, 6, 7, 8, 9, 10, 11, 12, 13, 14, 15, 16, 17, 18, 19, or 20 sequence alterations (e.g., substitutions, insertions, or deletions) relative thereto.

[0153] In some embodiments, a recombinase recognition site, e.g., an attB, attP, attL, or attR site, can be predicted by available software tools. In some embodiments, the recognition sites may be predictable by a phage prediction tool, e.g., PhiSpy (Akhter et al. Nucleic Acids Res 40(16):e126 (2012)) or PHASTER (Arndt et al. Nucleic Acids Res 44:W16-W21 (2016)), incorporated herein by reference. In some embodiments, the region proximal to an integrase coding sequence in its native context, e.g., in a bacteriophage genome, plasmid, or bacterial genome, e.g., a LeftRegion or a RightRegion of Table 2A, 2B, or 2C, comprises the native attachment site of a recombinase enzyme. In some embodiments, a minimal attachment site can be discovered empirically by testing fragments of the integrase proximal sequence, e.g., a LeftRegion or a RightRegion of Table 2A, 2B, or 2C, until the minimal sequence sufficient for a productive recombination reaction is discovered. In some embodiments, an integrase proximal sequence, e.g., a LeftRegion or a RightRegion of Table 2A, 2B, or 2C, or a fragment thereof, is assayed to determine the importance of each nucleotide, e.g., is profiled in a library format as per the methods of Bessen et al. Nat Commun 10:1937 (2019), incorporated herein by reference in its entirety. In some embodiments, a recombinase or a recombinase recognition site is selected through an evolutionary process for altered protein-nucleic acid interaction properties, e.g., a recombinase used in a Gene Writer system is evolved as described in WO2017015545, incorporated herein by reference in its entirety. In some embodiments, a recombinase and/or a recombinase recognition site is discovered through prediction of the ends of an integrated element in a native host genome, e.g., an integrated bacteriophage or integrated plasmid, e.g., as described in Yang et al. Nat Methods 11(12):1261-1266 (2014), incorporated herein by reference in its entirety.

[0154] In some embodiments, an attL or attR site is present in the human genome and the template DNA comprises the cognate site, e.g., the template comprises an attR sequence if the genome comprises an attL sequence. In some embodiments, when attL/R recognition sites are used in a Gene Writing system, the system also comprises a recombination directionality factor (RDF) to enable recognition and recombination of these sites. In some embodiments, a Gene Writer polypeptide and a cognate RDF are provided as a fusion polypeptide. An exemplary recombinase-RDF fusion is described in Olorunniji et al. Nucleic Acids Res 45(14):8635-8645 (2017), which is incorporated herein by reference in its entirety.

[0155] In some embodiments, the protein component(s) of a Gene Writing™ system as described herein may be pre-associated with a template (e.g., a DNA template). For example, in some embodiments, the Gene Writer™ polypeptide may be first combined with the DNA template to form a deoxyribonucleoprotein (DNP) complex. In some embodiments, the DNP may be delivered to cells via, e.g., transfection, nucleofection, virus, vesicle, LNP, exosome, fusosome. In some embodiments, the template DNA may be first associated with a DNA-bending factor, e.g., HMGB1, in order to facilitate excision and transposition when subsequently contacted with the transposase component. Additional description of DNP delivery is found, for example, in Guha and Calos J Mol Biol (2020), which is herein incorporated by reference in its entirety.

[0156] In some embodiments, a polypeptide described herein comprises one or more (e.g., 2, 3, 4, 5) nuclear targeting sequences, for example a nuclear localization sequence (NLS). In some embodiments, the NLS is a bipartite NLS. In some embodiments, an NLS facilitates the import of a protein comprising an NLS into the cell nucleus. In some embodiments, the NLS is fused to the N-terminus of a Gene Writer described herein. In some embodiments, the NLS is fused to the C-terminus of the Gene Writer. In some embodiments, the NLS is fused to the N-terminus or the C-terminus of a Cas domain. In some embodiments, a linker sequence is disposed between the NLS and the neighboring domain of the Gene Writer.

[0157] In some embodiments, an NLS comprises the amino acid sequence MDSLLMNRRKFLYQFKNVRWAKGRRETYLC (SEQ ID NO: 3432), PKKRKVEGADKRTADGSEFESPKKKRKV (SEQ ID NO: 3433), RKSGKIAAIWKRPRKPKKKRKV KRTADGSEFESPKKKRKV (SEQ ID NO: 3434), KKTELQTTNAENKTKKL (SEQ ID NO: 3435), or KRGINDRNFWRGENGRKTR (SEQ ID NO: 3436), KRPAATKKAGQAKKKK (SEQ ID NO: 3437), or a functional fragment or variant thereof. Exemplary NLS sequences are also described in PCT/EP2000/011690, the contents of which are incorporated herein by reference for their disclosure of exemplary nuclear localization sequences.

[0158] In some embodiments, the NLS is a bipartite NLS. A bipartite NLS typically comprises two basic amino acid clusters separated by a spacer sequence (which may be, e.g., about 10 amino acids in length). A monopartite NLS typically lacks a spacer. An example of a bipartite NLS is the nucleoplasmin NLS, having the sequence KR[PAATKKAGQA]KKKK (SEQ ID NO: 3437), wherein the spacer is bracketed. Another exemplary bipartite NLS has the sequence PKKKRKVEGADKRTADGSEFESPKKKRKV (SEQ ID NO: 3438). Exemplary NLSs are described in International Application WO2020051561, which is herein incorporated by reference in its entirety, including for its disclosures regarding nuclear localization sequences.

[0159] DNA Binding Domains

[0160] In some embodiments, a recombinase polypeptide (e.g., comprised in a system or cell as described herein), e.g., a tyrosine recombinase, comprises a DNA binding domain (e.g., a target binding domain or a template binding domain).

[0161] In some embodiments, a recombinase polypeptide described herein may be redirected to a defined target site in the human genome. In some embodiments, a recombinase described herein may be fused to a heterologous domain, e.g., a heterologous DNA binding domain. In some embodiments, a recombinase may be fused to a heterologous DNA binding domain, e.g., a DNA binding domain from a zinc finger, TAL, meganuclease, transcription factor, or sequence-guided DNA binding element. In some embodiments, a recombinase may be fused to a DNA binding domain from a sequence-guided DNA binding element, e.g., a CRISPR-associated (Cas) DNA binding element, e.g., a Cas9. In some embodiments, a DNA binding element fused to a recombinase domain may contain mutations inactivating other catalytic functions, e.g., mutations inactivating endonuclease activity, e.g., mutations creating an inactivated meganuclease or partially or completely inactivate Cas protein, e.g., mutations creating a nickase Cas9 or dead Cas9 (dCas9). As an example, Standage-Beier et al. CRISPR J2(4):209-222 (2019), describes the use of a dCas9 fused to the Tn3 resolvase (integrase Cas9, iCas9) that employs appropriate spacing of two monomeric fusion proteins at the target site for cooperative targeting for the sequence-specific integration of reporter systems into the genome of HEK293 cells. Additional examples of recombinase targeting by DNA binding domains include zinc finger fusions (zinc-finger recombinases, ZFRs (Gaj et al. Nucleic Acids Res 41(6):3937-3946 (2013)); RecZFs (Gersbach et al. Nucleic Acids Res 38(12):4198-4206 (2010))), TALE fusions (TALE recombinases, TALERs (Mercer et al. Nucleic Acids Res 40(21):11163-11172 (2012))), and dCas9 fusions (recombinase Cas9, recCas9 (Chaikind et al. Nucleic Acids Res 44(20):9758-9770 (2016)); integrase Cas9, iCas9 (Standage-Beier et al. CRISPR J2(4):209-222 (2019))), all of which are incorporated herein by reference.

[0162] In some embodiments, a DNA binding domain comprises a Streptococcus pyogenes Cas9 (SpCas9) or a functional fragment or variant thereof. In some embodiments, the DNA binding domain comprises a modified SpCas9. In embodiments, the modified SpCas9 comprises a modification that alters protospacer-adjacent motif (PAM) specificity. In embodiments, the PAM has specificity for the nucleic acid sequence 5′-NGT-3′. In embodiments, the modified SpCas9 comprises one or more amino acid substitutions, e.g., at one or more of positions L1111, D1135, G1218, E1219, A1322, of R1335, e.g., selected from L1111R, D1135V, G1218R, E1219F, A1322R, R1335V. In embodiments, the modified SpCas9 comprises the amino acid substitution T1337R and one or more additional amino acid substitutions, e.g., selected from L1111, D1135L, S1136R, G1218S, E1219V, D1332A, D1332S, D1332T, D1332V, D1332L, D1332K, D1332R, R1335Q, T1337, T1337L, T1337Q, T1337I, T1337V, T1337F, T1337S, T1337N, T1337K, T1337H, T1337Q, and T1337M, or corresponding amino acid substitutions thereto. In embodiments, the modified SpCas9 comprises: (i) one or more amino acid substitutions selected from D1135L, S1136R, G1218S, E1219V, A1322R, R1335Q, and T1337; and (ii) one or more amino acid substitutions selected from L1111R, G1218R, E1219F, D1332A, D1332S, D1332T, D1332V, D1332L, D1332K, D1332R, T1337L, T1337I, T1337V, T1337F, T1337S, T1337N, T1337K, T1337R, T1337H, T1337Q, and T1337M, or corresponding amino acid substitutions thereto.

[0163] In some embodiments, the DNA binding domain comprises a Cas domain, e.g., a Cas9 domain. In embodiments, the DNA binding domain comprises a nuclease-active Cas domain, a Cas nickase (nCas) domain, or a nuclease-inactive Cas (dCas) domain. In embodiments, the DNA binding domain comprises a nuclease-active Cas9 domain, a Cas9 nickase (nCas9) domain, or a nuclease-inactive Cas9 (dCas9) domain. In some embodiments, the DNA binding domain comprises a Cas9 domain of Cas9 (e.g., dCas9 and nCas9), Cas12a/Cpfl, Cas12b/C2c1, Cas12c/C2c3, Cas12d/CasY, Cas12e/CasX, Cas12g, Cas12h, or Cas12i. In some embodiments, the DNA binding domain comprises a Cas9 (e.g., dCas9 and nCas9), Cas12a/Cpf1, Cas12b/C2c1, Cas12c/C2c3, Cas12d/CasY, Cas12e/CasX, Cas12g, Cas12h, or Cas12i. In some embodiments, the DNA binding domain comprises an S. pyogenes or an S. thermophilus Cas9, or a functional fragment thereof. In some embodiments, the DNA binding domain comprises a Cas9 sequence, e.g., as described in Chylinski, Rhun, and Charpentier (2013) RNA Biology 10:5, 726-737; incorporated herein by reference. In some embodiments, the DNA binding domain comprises the HNH nuclease subdomain and/or the RuvC1 subdomain of a Cas, e.g., Cas9, e.g., as described herein, or a variant thereof. In some embodiments, the DNA binding domain comprises Cas12a/Cpf1, Cas12b/C2c1, Cas12c/C2c3, Cas12d/CasY, Cas12e/CasX, Cas12g, Cas12h, or Cas12i. In some embodiments, the DNA binding domain comprises a Cas polypeptide (e.g., enzyme), or a functional fragment thereof. In embodiments, the Cas polypeptide (e.g., enzyme) is selected from Cas1, Cas1B, Cas2, Cas3, Cas4, Cas5, Cas5d, Cas5t, Cas5h, Cas5a, Cash, Cas7, Cas8, Cas8a, Cas8b, Cas8c, Cas9 (e.g., Csn1 or Csx12), Cas10, Cas10d, Cas12a/Cpf1, Cas12b/C2c1, Cas12c/C2c3, Cas12d/CasY, Cas12e/CasX, Cas12g, Cas12h, Cas12i, Csy1, Csy2, Csy3, Csy4, Cse1, Cse2, Cse3, Cse4, Cse5e, Csc1, Csc2, Csa5, Csn1, Csn2, Csm1, Csm2, Csm3, Csm4, Csm5, Csm6, Cmr1, Cmr3, Cmr4, Cmr5, Cmr6, Csb1, Csb2, Csb3, Csx17, Csx14, Csx10, Csx16, CsaX, Csx3, Csx1, Csx1S, Csx11, Csf1, Csf2, CsO, Csf4, Csd1, Csd2, Cst1, Cst2, Csh1, Csh2, Csa1, Csa2, Csa3, Csa4, Csa5, Type II Cas effector proteins, Type V Cas effector proteins, Type VI Cas effector proteins, CARF, DinG, Cpf1, Cas12b/C2c1, Cas12c/C2c3, Cas12b/C2c1, Cas12c/C2c3, SpCas9(K855A), eSpCas9(1.1), SpCas9-HF1, hyper accurate Cas9 variant (HypaCas9), homologues thereof, modified or engineered versions thereof, and/or functional fragments thereof. In embodiments, the Cas9 comprises one or more substitutions, e.g., selected from H840A, D10A, P475A, W476A, N477A, D1125A, W1126A, and D1127A. In embodiments, the Cas9 comprises one or more mutations at positions selected from: D10, G12, G17, E762, H840, N854, N863, H982, H983, A984, D986, and/or A987, e.g., one or more substitutions selected from D10A, G12A, G17A, E762A, H840A, N854A, N863A, H982A, H983A, A984A, and/or D986A. In some embodiments, the DNA binding domain comprises a Cas (e.g., Cas9) sequence from Corynebacterium ulcerans, Corynebacterium diphtheria, Spiroplasma syrphidicola, Prevotella intermedia, Spiroplasma taiwanense, Streptococcus iniae, Belliella baltica, Psychroflexus torquis, Streptococcus thermophilus, Listeria innocua, Campylobacter jejuni, Neisseria meningitidis, Streptococcus pyogenes, or Staphylococcus aureus, or a fragment or variant thereof.

[0164] In some embodiments, the DNA binding domain comprises a Cpf1 domain, e.g., comprising one or more substitutions, e.g., at position D917, E1006A, D1255 or any combination thereof, e.g., selected from D917A, E1006A, D1255A, D917A/E1006A, D917A/D1255A, E1006A/D1255A, and D917A/E1006A/D1255A.

[0165] In some embodiments, the DNA binding domain comprises spCas9, spCas9-VRQR, spCas9-VRER, xCas9 (sp), saCas9, saCas9-KKH, spCas9-MQKSER, spCas9-LRKIQK, or spCas9-LRVSQL.

[0166] In some embodiments, the DNA-binding domain comprises an amino acid sequence as listed in Table 37 below, or an amino acid sequence having at least 80%, 85%, 90%, 95%, 96%, 97%, 98%, or 99% sequence identity thereto. In some embodiments, the DNA-binding domain comprises an amino acid sequence that has no more than 1, 2, 3, 4, 5, 6, 7, 8, 9, 10, 11, 12, 13, 14, 15, 16, 17, 18, 19, 20, 21, 22, 23, 24, 25, 26, 27, 28, 29, 30, 31, 32, 33, 34, 35, 36, 37, 38, 39, 40, 41, 42, 43, 44, 45, 46, 47, 48, 49, or 50 differences (e.g., mutations) relative to any of the amino acid sequences described herein.

TABLE 37
Each of the Reference Sequences are incorporated by reference in their entirety.

| Name | Amino Acid Sequence or Reference Sequence |
|---|---|
| Streptococcus pyogenes Cas9 | |
| Exemplary Linker | SGSETPGTSESATPES (SEQ ID NO: 3439) |
| Exemplary Linker Motif | (SGGS)ₙ (SEQ ID NO: 3440) |
| Exemplary Linker Motif | (GGGS)ₙ (SEQ ID NO: 3441) |
| Exemplary Linker Motif | (GGGGS)ₙ (SEQ ID NO: 3442) |
| Exemplary Linker Motif | (G)ₙ |
| Exemplary Linker Motif | (EAAAK)ₙ (SEQ ID NO: 3443) |
| Exemplary Linker Motif | (GGS)ₙ |
| Exemplary Linker Motif | (XP)ₙ |
| Cas9 from Streptococcus | NCBI Reference Sequence: NC_002737.2 and Uniprot Reference |
| pyogenes | Sequence: Q99ZW2 |
| Cas9 from Corynebacterium | NCBI Refs: NC_015683.1, NC_017317.1 |
| ulcerans | |
| Cas9 from Corynebacterium | NCBI Refs: NC_016782.1, NC_016786.1 |
| diphtheria | |
| Cas9 from Spiroplasma | NCBI Ref: NC_021284.1 |
| syrphidicola | |
| Cas9 from Prevotella | NCBI Ref: NC_017861.1 |
| intermedia | |
| Cas9 from Spiroplasma | NCBI Ref: NC_021846.1 |
| taiwanense | |
| Cas9 from Streptococcus | NCBI Ref: NC_021314.1 |
| iniae | |
| Cas9 from Belliella baltica | NCBI Ref: NC_018010.1 |
| Cas9 from Psychroflexus | NCBI Ref: NC_018721.1 |
| torquisi | |
| Cas9 from Streptococcus | NCBI Ref: YP_820832.1 |
| thermophilus | |
| Cas9 from Listeria innocua | NCBI Ref: NP_472073.1 |
| Cas9 from Campylobacter | NCBI Ref: YP_002344900.1 |
| jejuni | |
| Cas9 from Neisseria | NCBI Ref: YP_002342100.1 |
| meningitidis | |
| dCas9 (DIOAand H840A) | |
| Catalytically inactive Cas9 | |
| (dCas9) | |
| Cas9 nickase (nCas9) | |
| Catalytically active Cas9 | |
| CasY | ((ncbi.nlm.nih.gov/protein/APG80656.1) |
| | >APG80656.1 CRISPR-associated protein CasY [uncultured |
| | Parcubacteria group bacterium]) |
| CasX | uniprot.org/uniprot/F0NN87; uniprot.org/uniprot/F0NH53 |
| CasX | >tr\|FONH53\|FONH53_SULIR CRISPR associated protein, Casx OS = |
| | Sulfolobus islandicus (strain REY15A) |
| | GN = SiRe_0771 PE = 4 SV = 1 |
| Deltaproteobacteria CasX | |
| Cas12b/C2c1 | ((uniprot.org/uniprot/T0D7A2#2) sp TOD7A2 C2C1_ALIAG |
| | CRISPR-associated endonuclease |
| | C2c1 OS = Alicyclobacillus acido- |
| | terrestris (strain ATCC 49025/DSM 3922/CIP 106132/NCIMB |
| | 13137/GD3B) GN = c2c1 PE = 1 SV = 1) |
| BhCasl2b (Bacillus hisashii) | NCBI Reference Sequence: WP_095142515 |
| BvCasl2b (Bacillus sp. V3- | NCBI Reference Sequence: WP_101661451.1 |
| 13) | |
| Wild-type Francisella | |
| novicida Cpf1 | |
| Francisella novicida Cpf1 | |
| D917A | |
| Francisella novicida Cpf1 | |
| E1006A | |
| Francisella novicida Cpf1 | |
| D1255A | |
| Francisella novicida Cpf1 | |
| D917A/E1006A | |
| Francisella novicida Cpf1 | |
| D917A/D1255A | |
| Francisella novicida Cpf1 | |
| E1006A/D1255A | |
| Francisella novicida Cpf1 | |
| D917A/E1006A | |
| SaCas9 | |
| SaCas9n | |
| PAM-binding SpCas9 | |
| PAM-binding SpCas9n | |
| PAM-binding SpEQR Cas9 | |
| PAM-binding SpVQR Cas9 | |
| PAM-binding SpVRER Cas9 | |
| PAM-binding SpVRQR Cas9 | |
| SpyMacCas9 | |

[0167] In some embodiments, the Cas polypeptide binds a gRNA that directs DNA binding. In some embodiments, the gRNA comprises, e.g., from 5′ to 3′ (1) a gRNA spacer; (2) a gRNA scaffold. In some embodiments:
[0168] (1) Is a Cas9 spacer of ˜18-22 nt, e.g., is 20 nt
[0169] (2) Is a gRNA scaffold comprising one or more hairpin loops, e.g., 1, 2, of 3 loops for associating the template with a nickase Cas9 domain. In some embodiments, the gRNA scaffold carries the sequence, from 5′ to 3′,

(SEQ ID NO: 3444)
GTTTTAGAGCTAGAAATAGCAAGTTAAAATAAGGC
TAGTCCGTTATCAACTTGAAAAAGTGGGACCGAGT
CGGTCC.

[0170] In some embodiments, a Gene Writing system described herein is used to make an edit in HEK293, K562, U2OS, or HeLa cells. In some embodiment, a Gene Writing system is used to make an edit in primary cells, e.g., primary cortical neurons from E18.5 mice.

[0171] In some embodiments, a system or method described herein involves a CRISPR DNA targeting enzyme or system described in US Pat. App. Pub. No. 20200063126, 20190002889, or 20190002875 (each of which is incorporated by reference herein in its entirety) or a functional fragment or variant thereof. For instance, in some embodiments, a GeneWriter polypeptide or Cas endonuclease described herein comprises a polypeptide sequence of any of the applications mentioned in this paragraph, and in some embodiments a guide RNA comprises a nucleic acid sequence of any of the applications mentioned in this paragraph.

[0172] In some embodiments, the DNA binding domain (e.g., a target binding domain or a template binding domain) comprises a meganuclease domain, or a functional fragment thereof. In some embodiments, the meganuclease domain possesses endonuclease activity, e.g., double-strand cleavage and/or nickase activity. In other embodiments, the meganuclease domain has reduced activity, e.g., lacks endonuclease activity, e.g., the meganuclease is catalytically inactive. In some embodiments, a catalytically inactive meganuclease is used as a DNA binding domain, e.g., as described in Fonfara et al. Nucleic Acids Res 40(2):847-860 (2012), incorporated herein by reference in its entirety. In embodiments, the DNA binding domain comprises one or more modifications relative to a wild-type DNA binding domain, e.g., a modification via directed evolution, e.g., phage-assisted continuous evolution (PACE).

[0173] Inteins

[0174] In some embodiments, as described in more detail below, Intein-N may be fused to the N-terminal portion of a polypeptide (e.g., a Gene Writer polypeptide) described herein, e.g., at a first domain. In embodiments, intein-C may be fused to the C-terminal portion of the polypeptide described herein (e.g., at a second domain), e.g., for the joining of the N-terminal portion to the C-terminal portion, thereby joining the first and second domains. In some embodiments, the first and second domains are each independently chosen from a DNA binding domain and a catalytic domain, e.g., a recombinase domain. In some embodiments, a single domain is split using the intein strategy described herein, e.g., a DNA binding domain, e.g., a dCas9 domain.

[0175] In some embodiments, a system or method described herein involves an intein that is a self-splicing protein intron (e.g., peptide), e.g., which ligates flanking N-terminal and C-terminal exteins (e.g., fragments to be joined). An intein may, in some instances, comprise a fragment of a protein that is able to excise itself and join the remaining fragments (the exteins) with a peptide bond in a process known as protein splicing. Inteins are also referred to as “protein inons.” The process of an intein excising itself and joining the remaining portions of the protein is herein termed “protein splicing” or “intein-mediated protein splicing.” In some embodiments, an intein of a precursor protein (an intein containing protein prior to intein-mediated protein splicing) comes from two genes. Such intein is referred to herein as a split intein (e.g., split intein-N and split intein-C). For example, in cyanobacteria, DnaE, the catalytic subunit a of DNA polymerase III, is encoded by two separate genes, dnaE-n and dnaE-c. The intein encoded by the dnaE-n gene may be herein referred as “intein-N.” The intein encoded by the dnaE-c gene may be herein referred as “intein-C.”

[0176] Use of inteins for joining heterologous protein fragments is described, for example, in Wood et al., J. Biol. Chem. 289(21); 14512-9 (2014) (incorporated herein by reference in its entirety). For example, when fused to separate protein fragments, the inteins IntN and IntC may recognize each other, splice themselves out, and/or simultaneously ligate the flanking N- and C-terminal exteins of the protein fragments to which they were fused, thereby reconstituting a full-length protein from the two protein fragments.

[0177] In some embodiments, a synthetic intein based on the dnaE intein, the Cfa-N (e.g., split intein-N) and Cfa-C (e.g., split intein-C) intein pair, is used. Examples of such inteins have been described, e.g., in Stevens et al., J Am Chem Soc. 2016 Feb. 24; 138(7):2162-5 (incorporated herein by reference in its entirety). Non-limiting examples of intein pairs that may be used in accordance with the present disclosure include: Cfa DnaE intein, Ssp GyrB intein, Ssp DnaX intein, Ter DnaE3 intein, Ter ThyX intein, Rma DnaB intein and Cne Prp8 intein (e.g., as described in U.S. Pat. No. 8,394,604, incorporated herein by reference.

[0178] In some embodiments, Intein-N and intein-C may be fused to the N-terminal portion of the split Cas9 and the C-terminal portion of a split Cas9, respectively, for the joining of the N-terminal portion of the split Cas9 and the C-terminal portion of the split Cas9. For example, in some embodiments, an intein-N is fused to the C-terminus of the N-terminal portion of the split Cas9, i.e., to form a structure of N—[N-terminal portion of the split Cas9]-[intein-N]˜C. In some embodiments, an intein-C is fused to the N-terminus of the C-terminal portion of the split Cas9, i.e., to form a structure of N-[intein-C]˜[C-terminal portion of the split Cas9]-C. The mechanism of intein-mediated protein splicing for joining the proteins the inteins are fused to (e.g., split Cas9) is described in Shah et al., Chem Sci. 2014; 5(0:446-461, incorporated herein by reference. Methods for designing and using inteins are known in the art and described, for example by WO2020051561, WO2014004336, WO2017132580, US20150344549, and US20180127780, each of which is incorporated herein by reference in their entirety.

[0179] In some embodiments, a split refers to a division into two or more fragments. In some embodiments, a split Cas9 protein or split Cas9 comprises a Cas9 protein that is provided as an N-terminal fragment and a C-terminal fragment encoded by two separate nucleotide sequences. The polypeptides corresponding to the N-terminal portion and the C-terminal portion of the Cas9 protein may be spliced to form a reconstituted Cas9 protein. In embodiments, the Cas9 protein is divided into two fragments within a disordered region of the protein, e.g., as described in Nishimasu et al., Cell, Volume 156, Issue 5, pp. 935-949, 2014, or as described in Jiang et al. (2016) Science 351: 867-871 and PDB file: 5F9R (each of which is incorporated herein by reference in its entirety). A disordered region may be determined by one or more protein structure determination techniques known in the art, including, without limitation, X-ray crystallography, NMR spectroscopy, electron microscopy (e.g., cryoEM), and/or in silico protein modeling. In some embodiments, the protein is divided into two fragments at any C, T, A, or S, e.g., within a region of SpCas9 between amino acids A292-G364, F445-K483, or E565-T637, or at corresponding positions in any other Cas9, Cas9 variant (e.g., nCas9, dCas9), or other napDNAbp. In some embodiments, protein is divided into two fragments at SpCas9 T310, T313, A456, S469, or C574. In some embodiments, the process of dividing the protein into two fragments is referred to as splitting the protein.

[0180] In some embodiments, a protein fragment ranges from about 2-1000 amino acids (e.g., between 2-10, 10-50, 50-100, 100-200, 200-300, 300-400, 400-500, 500-600, 600-700, 700-800, 800-900, or 900-1000 amino acids) in length. In some embodiments, a protein fragment ranges from about 5-500 amino acids (e.g., between 5-10, 10-50, 50-100, 100-200, 200-300, 300-400, or 400-500 amino acids) in length. In some embodiments, a protein fragment ranges from about 20-200 amino acids (e.g., between 20-30, 30-40, 40-50, 50-100, or 100-200 amino acids) in length.

[0181] In some embodiments, a portion or fragment of a Gene Writer polypeptide, e.g., as described herein, is fused to an intein. The nuclease can be fused to the N-terminus or the C-terminus of the intein. In some embodiments, a portion or fragment of a fusion protein is fused to an intein and fused to an AAV capsid protein. The intein, nuclease and capsid protein can be fused together in any arrangement (e.g., nuclease-intein-capsid, intein-nuclease-capsid, capsid-intein-nuclease, etc.). In some embodiments, the N-terminus of an intein is fused to the C-terminus of a fusion protein and the C-terminus of the intein is fused to the N-terminus of an AAV capsid protein.

[0182] In some embodiments, a Gene Writer polypeptide (e.g., comprising a nickase Cas9 domain) is fused to intein-N and a polypeptide comprising a polymerase domain is fused to an intein-C.

[0183] Exemplary nucleotide and amino acid sequences of interns are provided below:

DnaE Intein-N DNA:
(SEQ ID NO: 3445)
TGCCTGTCATACGAAACCGAGATACTGACAGTAGA
ATATGGCCTTCTGCCAATCGGGAAGATTGTGGAGA
AACGGATAGAATGCACAGTTTACTCTGTCGATAAC
AATGGTAACATTTATACTCAGCCAGTTGCCCAGTG
GCACGACCGGGGAGAGCAGGAAGTATTCGAATACT
GTCTGGAGGATGGAAGTCTCATTAGGGCCACTAAG
GACCACAAATTTATGACAGTCGATGGCCAGATGCT
GCCTATAGACGAAATCTTTGAGCGAGAGTTGGACC
TCATGCGAGTTGACAACCTTCCTAAT
DnaE Intein-N Protein:
(SEQ ID NO: 3446)
CLSYETEILTVEYGLLPIGKIVEKRIECTVYSVDN
NGNIYTQPVAQWHDRGEQEVFEYCLEDGSLIRATK
DHKFMTVDGQMLPIDEIFERELDLMRVDNLPN
DnaE Intein-C DNA:
(SEQ ID NO: 3447)
ATGATCAAGATAGCTACAAGGAAGTATCTTGGCAA
ACAAAACGTTTATGATATTGGAGTCGAAAGAGATC
ACAACTTTGCTCTGAAGAACGGATTCATAGCTTCT
AAT
Intein-C:
(SEQ ID NO: 3448)
MIKIATRKYLGKQNVYDIGVERDHNFALKNGFIASN
Cfa-N DNA:
(SEQ ID NO: 3449)
TGCCTGTCTTATGATACCGAGATACTTACCGTTGA
ATATGGCTTCTTGCCTATTGGAAAGATTGTCGAAG
AGAGAATTGAATGCACAGTATATACTGTAGACAAG
AATGGTTTCGTTTACACACAGCCCATTGCTCAATG
GCACAATCGCGGCGAACAAGAAGTATTTGAGTACT
GTCTCGAGGATGGAAGCATCATACGAGCAACTAAA
GATCATAAATTCATGACCACTGACGGGCAGATGTT
GCCAATAGATGAGATATTCGAGCGGGGCTTGGATC
TCAAACAAGTGGATGGATTGCCA
Cfa-N Protein:
(SEQ ID NO: 3450)
CLSYDTEILTVEYGFLPIGKIVEERIECTVYTVDK
NGFVYTQPIAQWHNRGEQEVFEYCLEDGSIIRATK
DHKFMTTDGQMLPIDEIFERGLDLKQVDGLP
Cfa-C DNA:
(SEQ ID NO: 3451)
ATGAAGAGGACTGCCGATGGATCAGAGTTTGAATC
TCCCAAGAAGAAGAGGAAAGTAAAGATAATATCTC
GAAAAAGTCTTGGTACCCAAAATGTCTATGATATT
GGAGTGGAGAAAGATCACAACTTCCTTCTCAAGAA
CGGTCTCGTAGCCAGCAAC
Cfa-C Protein:
(SEQ ID NO: 3452)
MKRTADGSEFESPKKKRKVKIISRKSLGTQNVYDI
GVEKDHNFLLKNGLVASN

### Genomic Safe Harbor Sites

[0184] In some embodiments, a Gene Writer targets a genomic safe harbor site (e.g., directs insertion of a heterologous object sequence into a position having a safe harbor score of at least 3, 4, 5, 6, 7, or 8). In some embodiments the genomic safe harbor site is a Natural Harbor™ site. In some embodiments, a Natural Harbor™ site is derived from the native target of a mobile genetic element, e.g., a recombinase, transposon, retrotransposon, or retrovirus. The native targets of mobile elements may serve as ideal locations for genomic integration given their evolutionary selection. In some embodiments the Natural Harbor™ site is ribosomal DNA (rDNA). In some embodiments the Natural Harbor™ site is 5S rDNA, 18S rDNA, 5.8S rDNA, or 28S rDNA. In some embodiments the Natural Harbor™ site is the Mutsu site in 5S rDNA. In some embodiments the Natural Harbor™ site is the R2 site, the R5 site, the R6 site, the R4 site, the R1 site, the R9 site, or the RT site in 28S rDNA. In some embodiments the Natural Harbor™ site is the R8 site or the R7 site in 18S rDNA. In some embodiments the Natural Harbor™ site is DNA encoding transfer RNA (tRNA). In some embodiments the Natural Harbor™ site is DNA encoding tRNA-Asp or tRNA-Glu. In some embodiments the Natural Harbor™ site is DNA encoding spliceosomal RNA. In some embodiments the Natural Harbor™ site is DNA encoding small nuclear RNA (snRNA) such as U2 snRNA.

[0185] Thus, in some aspects, the present disclosure provides a method comprising comprises using a GeneWriter system described herein to insert a heterologous object sequence into a Natural Harbor™ site. In some embodiments, the Natural Harbor™ site is a site described in Table 4A below. In some embodiments, the heterologous object sequence is inserted within 20, 50, 100, 150, 200, 250, 500, or 1000 base pairs of the Natural Harbor™ site. In some embodiments, the heterologous object sequence is inserted within 0.1 kb, 0.25 kb, 0.5 kb, 0.75, kb, 1 kb, 2 kb, 3 kb, 4 kb, 5 kb, 7.5 kb, 10 kb, 15 kb, 20 kb, 25 kb, 50, 75 kb, or 100 kb of the Natural Harbor™ site. In some embodiments, the heterologous object sequence is inserted into a site having at least 70%, 75%, 80%, 85%, 90%, 95%, 96%, 97%, 98%, or 99% identity to a sequence shown in Table 4A. In some embodiments, the heterologous object sequence is inserted within 20, 50, 100, 150, 200, 250, 500, or 1000 base pairs, or within 0.1 kb, 0.25 kb, 0.5 kb, 0.75, kb, 1 kb, 2 kb, 3 kb, 4 kb, 5 kb, 7.5 kb, 10 kb, 15 kb, 20 kb, 25 kb, 50, 75 kb, or 100 kb, of a site having at least 70%, 75%, 80%, 85%, 90%, 95%, 96%, 97%, 98%, or 99% identity to a sequence shown in Table 4A. In some embodiments, the heterologous object sequence is inserted within a gene indicated in Column 5 of Table 4A, or within 20, 50, 100, 150, 200, 250, 500, or 1000 base pairs, or within 0.1 kb, 0.25 kb, 0.5 kb, 0.75, kb, 1 kb, 2 kb, 3 kb, 4 kb, 5 kb, 7.5 kb, 10 kb, 15 kb, 20 kb, 25 kb, 50, 75 kb, or 100 kb, of the gene.

TABLE 4A
Natural Harbor™ sites. Column 1 indicates a retrotransposon
that inserts into the Natural Harbor™ site. Column 2
indicates the gene at the Natural Harbor™ site. Columns 3
and 4 show exemplary human genome sequence 5′ and 3′
of the insertion site (for example, 250 bp).
Columns 5 and 6 list the example gene symbol
and corresponding Gene ID.

| | | | | Example | |
|---|---|---|---|---|---|
| Target | Target | | | Gene | Example |
| Site | Gene | 5′ flanking sequence | 3′ flanking sequence | Symbol | Gene ID |
| R2 | 28S | CCGGTCCCCCCCGCC | GTAGCCAAATGCCTC | RNA28SN | 106632264 |
| | rDNA | GGGTCCGCCCCCGGG | GTCATCTAATTAGTG | 1 | |
| | | GCCGCGGTTCCGCGC | ACGCGCATGAATGGA | | |
| | | GGCGCCTCGCCTCGG | TGAACGAGATTCCCA | | |
| | | CCGGCGCCTAGCAGC | CTGTCCCTACCTACTA | | |
| | | CGACTTAGAACTGGT | TCCAGCGAAACCACA | | |
| | | GCGGACCAGGGGAAT | GCCAAGGGAACGGGC | | |
| | | CCGACTGTTTAATTA | TTGGCGGAATCAGCG | | |
| | | AAACAAAGCATCGCG | GGGAAAGAAGACCCT | | |
| | | AAGGCCCGCGGCGGG | GTTGAGCTTGACTCT | | |
| | | TGTTGACGCGATGTG | AGTCTGGCACGGTGA | | |
| | | ATTTCTGCCCAGTGCT | AGAGACATGAGAGGT | | |
| | | CTGAATGTCAAAGTG | GTAGAATAAGTGGGA | | |
| | | AAGAAATTCAATGAA | GGCCCCCGGCGCCCC | | |
| | | GCGCGGGTAAACGGC | CCCGGTGTCCCCGCG | | |
| | | GGGAGTAACTATGAC | AGGGGCCCGGGGCGG | | |
| | | TCTCTTAAG (SEQ ID | GGTCCGCCG (SEQ ID | | |
| | | NO: 3453) | NO: 3464) | | |
| R4 | 28S | GCGGTTCCGCGCGGC | CGCATGAATGGATGA | RNA28SN | 106632264 |
| | rDNA | GCCTCGCCTCGGCCG | ACGAGATTCCCACTG | 1 | |
| | | GCGCCTAGCAGCCGA | TCCCTACCTACTATCC | | |
| | | CTTAGAACTGGTGCG | AGCGAAACCACAGCC | | |
| | | GACCAGGGGAATCCG | AAGGGAACGGGCTTG | | |
| | | ACTGTTTAATTAAAA | GCGGAATCAGCGGGG | | |
| | | CAAAGCATCGCGAAG | AAAGAAGACCCTGTT | | |
| | | GCCCGCGGCGGGTGT | GAGCTTGACTCTAGT | | |
| | | TGACGCGATGTGATT | CTGGCACGGTGAAGA | | |
| | | TCTGCCCAGTGCTCTG | GACATGAGAGGTGTA | | |
| | | AATGTCAAAGTGAAG | GAATAAGTGGGAGGC | | |
| | | AAATTCAATGAAGCG | CCCCGGCGCCCCCCC | | |
| | | CGGGTAAACGGCGGG | GGTGTCCCCGCGAGG | | |
| | | AGTAACTATGACTCT | GGCCCGGGGCGGGGT | | |
| | | CTTAAGGTAGCCAAA | CCGCCGGCCCTGCGG | | |
| | | TGCCTCGTCATCTAAT | GCCGCCGGTGAAATA | | |
| | | TAGTGACG (SEQ ID | CCACTACTC (SEQ ID | | |
| | | NO: 3454) | NO: 3465) | | |
| R5 | 28S | TCCCCCCCGCCGGGT | CCAAATGCCTCGTCA | RNA28SN | 106632264 |
| | rDNA | CCGCCCCCGGGGCCG | TCTAATTAGTGACGC | 1 | |
| | | CGGTTCCGCGCGGCG | GCATGAATGGATGAA | | |
| | | CCTCGCCTCGGCCGG | CGAGATTCCCACTGT | | |
| | | CGCCTAGCAGCCGAC | CCCTACCTACTATCCA | | |
| | | TTAGAACTGGTGCGG | GCGAAACCACAGCCA | | |
| | | ACCAGGGGAATCCGA | AGGGAACGGGCTTGG | | |
| | | CTGTTTAATTAAAAC | CGGAATCAGCGGGGA | | |
| | | AAAGCATCGCGAAGG | AAGAAGACCCTGTTG | | |
| | | CCCGCGGCGGGTGTT | AGCTTGACTCTAGTCT | | |
| | | GACGCGATGTGATTT | GGCACGGTGAAGAGA | | |
| | | CTGCCCAGTGCTCTG | CATGAGAGGTGTAGA | | |
| | | AATGTCAAAGTGAAG | ATAAGTGGGAGGCCC | | |
| | | AAATTCAATGAAGCG | CCGGCGCCCCCCCGG | | |
| | | CGGGTAAACGGCGGG | TGTCCCCGCGAGGGG | | |
| | | AGTAACTATGACTCT | CCCGGGGCGGGGTCC | | |
| | | CTTAAGGTAG (SEQ ID | GCCGGCCC (SEQ ID | | |
| | | NO: 3455) | NO: 3466) | | |
| R9 | 28S | CGGCGCGCTCGCCGG | TAGCTGGTTCCCTCCG | RNA28SN | 106632264 |
| | rDNA | CCGAGGTGGGATCCC | AAGTTTCCCTCAGGA | 1 | |
| | | GAGGCCTCTCCAGTC | TAGCTGGCGCTCTCG | | |
| | | CGCCGAGGGCGCACC | CAGACCCGACGCACC | | |
| | | ACCGGCCCGTCTCGC | CCCGCCACGCAGTTT | | |
| | | CCGCCGCGCCGGGGA | TATCCGGTAAAGCGA | | |
| | | GGTGGAGCACGAGCG | ATGATTAGAGGTCTT | | |
| | | CACGTGTTAGGACCC | GGGGCCGAAACGATC | | |
| | | GAAAGATGGTGAACT | TCAACCTATTCTCAA | | |
| | | ATGCCTGGGCAGGGC | ACTTTAAATGGGTAA | | |
| | | GAAGCCAGAGGAAAC | GAAGCCCGGCTCGCT | | |
| | | TCTGGTGGAGGTCCG | GGCGTGGAGCCGGGC | | |
| | | TAGCGGTCCTGACGT | GTGGAATGCGAGTGC | | |
| | | GCAAATCGGTCGTCC | CTAGTGGGCCACTTTT | | |
| | | GACCTGGGTATAGGG | GGTAAGCAGAACTGG | | |
| | | GCGAAAGACTAATCG | CGCTGCGGGATGAAC | | |
| | | AACCATCTAG (SEQ ID | CGAACGCC (SEQ ID | | |
| | | NO: 3456) | NO: 3467) | | |
| R8 | 18S | GCATTCGTATTGCGC | TGAAACTTAAAGGAA | RNA18SN | 106631781 |
| | rDNA | CGCTAGAGGTGAAAT | TTGACGGAAGGGCAC | 1 | |
| | | TCTTGGACCGGCGCA | CACCAGGAGTGGAGC | | |
| | | AGACGGACCAGAGCG | CTGCGGCTTAATTTG | | |
| | | AAAGCATTTGCCAAG | ACTCAACACGGGAAA | | |
| | | AATGTTTTCATTAATC | CCTCACCCGGCCCGG | | |
| | | AAGAACGAAAGTCGG | ACACGGACAGGATTG | | |
| | | AGGTTCGAAGACGAT | ACAGATTGATAGCTC | | |
| | | CAGATACCGTCGTAG | TTTCTCGATTCCGTGG | | |
| | | TTCCGACCATAAACG | GTGGTGGTGCATGGC | | |
| | | ATGCCGACCGGCGAT | CGTTCTTAGTTGGTGG | | |
| | | GCGGCGGCGTTATTC | AGCGATTTGTCTGGTT | | |
| | | CCATGACCCGCCGGG | AATTCCGATAACGAA | | |
| | | CAGCTTCCGGGAAAC | CGAGACTCTGGCATG | | |
| | | CAAAGTCTTTGGGTT | CTAACTAGTTACGCG | | |
| | | CCGGGGGGAGTATGG | ACCCCCGAGCGGTCG | | |
| | | TTGCAAAGC (SEQ ID | GCGTCCC | | |
| | | NO: 3457) | (SEQ ID NO: 3468) | | |
| R4- | tRNA- | | | TRD- | 100189207 |
| 2_SRa | Asp | | | GTC1-1 | |
| LIN25 | tRNA- | | | TRE- | 100189384 |
| _SM | Glu | | | CTC1-1 | |
| R1 | 28S | TAGCAGCCGACTTAG | ACCTACTATCCAGCG | RNA28SN | 106632264 |
| | rDNA | AACTGGTGCGGACCA | AAACCACAGCCAAGG | 1 | |
| | | GGGGAATCCGACTGT | GAACGGGCTTGGCGG | | |
| | | TTAATTAAAACAAAG | AATCAGCGGGGAAAG | | |
| | | CATCGCGAAGGCCCG | AAGACCCTGTTGAGC | | |
| | | CGGCGGGTGTTGACG | TTGACTCTAGTCTGGC | | |
| | | CGATGTGATTTCTGCC | ACGGTGAAGAGACAT | | |
| | | CAGTGCTCTGAATGT | GAGAGGTGTAGAATA | | |
| | | CAAAGTGAAGAAATT | AGTGGGAGGCCCCCG | | |
| | | CAATGAAGCGCGGGT | GCGCCCCCCCGGTGT | | |
| | | AAACGGCGGGAGTAA | CCCCGCGAGGGGCCC | | |
| | | CTATGACTCTCTTAAG | GGGGCGGGGTCCGCC | | |
| | | GTAGCCAAATGCCTC | GGCCCTGCGGGCCGC | | |
| | | GTCATCTAATTAGTG | CGGTGAAATACCACT | | |
| | | ACGCGCATGAATGGA | ACTCTGATCGTTTTTT | | |
| | | TGAACGAGATTCCCA | CACTGACCCGGTGAG | | |
| | | CTGTCCCT (SEQ ID | GCGGGGGG (SEQ ID | | |
| | | NO: 3458) | NO: 3469) | | |
| R6 | 28S | CCCCCCGCCGGGTCC | AAATGCCTCGTCATC | RNA28SN | 106632264 |
| | rDNA | GCCCCCGGGGCCGCG | TAATTAGTGACGCGC | 1 | |
| | | GTTCCGCGCGGCGCC | ATGAATGGATGAACG | | |
| | | TCGCCTCGGCCGGCG | AGATTCCCACTGTCC | | |
| | | CCTAGCAGCCGACTT | CTACCTACTATCCAG | | |
| | | AGAACTGGTGCGGAC | CGAAACCACAGCCAA | | |
| | | CAGGGGAATCCGACT | GGGAACGGGCTTGGC | | |
| | | GTTTAATTAAAACAA | GGAATCAGCGGGGAA | | |
| | | AGCATCGCGAAGGCC | AGAAGACCCTGTTGA | | |
| | | CGCGGCGGGTGTTGA | GCTTGACTCTAGTCTG | | |
| | | CGCGATGTGATTTCT | GCACGGTGAAGAGAC | | |
| | | GCCCAGTGCTCTGAA | ATGAGAGGTGTAGAA | | |
| | | TGTCAAAGTGAAGAA | TAAGTGGGAGGCCCC | | |
| | | ATTCAATGAAGCGCG | CGGCGCCCCCCCGGT | | |
| | | GGTAAACGGCGGGAG | GTCCCCGCGAGGGGC | | |
| | | TAACTATGACTCTCTT | CCGGGGCGGGGTCCG | | |
| | | AAGGTAGCC (SEQ ID | CCGGCCCTG (SEQ ID | | |
| | | NO: 3459) | NO: 3470) | | |
| R7 | 18S | GCGCAAGACGGACCA | GGAGCCTGCGGCTTA | RNA18SN | 106631781 |
| | rDNA | GAGCGAAAGCATTTG | ATTTGACTCAACACG | 1 | |
| | | CCAAGAATGTTTTCA | GGAAACCTCACCCGG | | |
| | | TTAATCAAGAACGAA | CCCGGACACGGACAG | | |
| | | AGTCGGAGGTTCGAA | GATTGACAGATTGAT | | |
| | | GACGATCAGATACCG | AGCTCTTTCTCGATTC | | |
| | | TCGTAGTTCCGACCA | CGTGGGTGGTGGTGC | | |
| | | TAAACGATGCCGACC | ATGGCCGTTCTTAGTT | | |
| | | GGCGATGCGGCGGCG | GGTGGAGCGATTTGT | | |
| | | TTATTCCCATGACCCG | CTGGTTAATTCCGAT | | |
| | | CCGGGCAGCTTCCGG | AACGAACGAGACTCT | | |
| | | GAAACCAAAGTCTTT | GGCATGCTAACTAGT | | |
| | | GGGTTCCGGGGGGAG | TACGCGACCCCCGAG | | |
| | | TATGGTTGCAAAGCT | CGGTCGGCGTCCCCC | | |
| | | GAAACTTAAAGGAAT | AACTTCTTAGAGGGA | | |
| | | TGACGGAAGGGCACC | CAAGTGGCGTTCAGC | | |
| | | ACCAGGAGT (SEQ ID | CACCCGAG (SEQ ID | | |
| | | NO: 3460) | NO: 3471) | | |
| RT | 28S | GGCCGGGCGCGACCC | AACTGGCTTGTGGCG | RNA28SN | 106632264 |
| | rDNA | GCTCCGGGGACAGTG | GCCAAGCGTTCATAG | 1 | |
| | | CCAGGTGGGGAGTTT | CGACGTCGCTTTTTGA | | |
| | | GACTGGGGCGGTACA | TCCTTCGATGTCGGCT | | |
| | | CCTGTCAAACGGTAA | CTTCCTATCATTGTGA | | |
| | | CGCAGGTGTCCTAAG | AGCAGAATTCACCAA | | |
| | | GCGAGCTCAGGGAGG | GCGTTGGATTGTTCA | | |
| | | ACAGAAACCTCCCGT | CCCACTAATAGGGAA | | |
| | | GGAGCAGAAGGGCA | CGTGAGCTGGGTTTA | | |
| | | AAAGCTCGCTTGATC | GACCGTCGTGAGACA | | |
| | | TTGATTTTCAGTACGA | GGTTAGTTTTACCCTA | | |
| | | ATACAGACCGTGAAA | CTGATGATGTGTTGTT | | |
| | | GCGGGGCCTCACGAT | GCCATGGTAATCCTG | | |
| | | CCTTCTGACCTTTTGG | CTCAGTACGAGAGGA | | |
| | | GTTTTAAGCAGGAGG | ACCGCAGGTTCAGAC | | |
| | | TGTCAGAAAAGTTAC | ATTTGGTGTATGTGCT | | |
| | | CACAGGGAT (SEQ ID | TGGC (SEQ ID NO: | | |
| | | NO: 3461) | 3472) | | |
| Mutsu | 5S rDNA | GTCTACGGCCATACC | TGAACGCGCCCGATC | RNA5S1 | 100169751 |
| | | ACCC (SEQ ID NO: | TCGTCTGATCTCGGA | | |
| | | 3462) | AGCTAAGCAGGGTCG | | |
| | | | GGCCTGGTTAGTACT | | |
| | | | TGGATGGGAGACCGC | | |
| | | | CTGGGAATACCGGGT | | |
| | | | GCTGTAGGCTTT (SEQ | | |
| | | | ID NO: 3473) | | |
| Utopia | U2 | ATCGCTTCTCGGCCTT | TCTGTTCTTATCAGTT | RNU2-1 | 6066 |
| /Keno | snRNA | TTGGCTAAGATCAAG | TAATATCTGATACGT | | |
| | | TGTAGTA (SEQ ID NO: | CCTCTATCCGAGGAC | | |
| | | 3463) | AATATATTAAATGGA | | |
| | | | TTTTTGGAGCAGGGA | | |
| | | | GATGGAATAGGAGCT | | |
| | | | TGCTCCGTCCACTCCA | | |
| | | | CGCATCGACCTGGTA | | |
| | | | TTGCAGTACCTCCAG | | |
| | | | GAACGGTGCACCC | | |
| | | | (SEQ ID NO: 3474) | | |

### Additional Functional Characteristics for Gene Writers™

[0186] A Gene Writer as described herein may, in some instances, be characterized by one or more functional measurements or characteristics. In some embodiments, the DNA binding domain (e.g., target binding domain) has one or more of the functional characteristics described below. In some embodiments, the template binding domain has one or more of the functional characteristics described below. In some embodiments, the template (e.g., template DNA) has one or more of the functional characteristics described below. In some embodiments, the target site altered by the Gene Writer has one or more of the functional characteristics described below following alteration by the Gene Writer.

[0187] Gene Writer Polypeptide

[0188] DNA Binding Domain

[0189] In some embodiments, the DNA binding domain is capable of binding to a target sequence (e.g., a dsDNA target sequence) with greater affinity than a reference DNA binding domain. In some embodiments, the reference DNA binding domain is a DNA binding domain from phiC31 recombinase from the Streptomyces bacteriophage phiC31. In some embodiments, the DNA binding domain is capable of binding to a target sequence (e.g., a dsDNA target sequence) with an affinity between 100 pM-10 nM (e.g., between 100 pM-1 nM or 1 nM-10 nM).

[0190] In some embodiments, the affinity of a DNA binding domain for its target sequence (e.g., dsDNA target sequence) is measured in vitro, e.g., by thermophoresis, e.g., as described in Asmari et al. Methods 146:107-119 (2018) (incorporated by reference herein in its entirety).

[0191] In embodiments, the DNA binding domain is capable of binding to its target sequence (e.g., dsDNA target sequence), e.g, with an affinity between 100 pM-10 nM (e.g., between 100 pM-1 nM or 1 nM-10 nM) in the presence of a molar excess of scrambled sequence competitor dsDNA, e.g., of about 100-fold molar excess.

[0192] In some embodiments, the DNA binding domain is found associated with its target sequence (e.g., dsDNA target sequence) more frequently than any other sequence in the genome of a target cell, e.g., human target cell, e.g., as measured by ChIP-seq (e.g., in HEK293T cells), e.g., as described in He and Pu (2010) Curr. Protoc Mol Biol Chapter 21 (incorporated herein by reference in its entirety). In some embodiments, the DNA binding domain is found associated with its target sequence (e.g., dsDNA target sequence) at least about 5-fold or 10-fold, more frequently than any other sequence in the genome of a target cell, e.g., as measured by ChIP-seq (e.g., in HEK293T cells), e.g., as described in He and Pu (2010), supra.

[0193] Template Binding Domain

[0194] In some embodiments, the template binding domain is capable of binding to a template DNA with greater affinity than a reference DNA binding domain. In some embodiments, the reference DNA binding domain is a DNA binding domain from phiC31 recombinase from the Streptomyces bacteriophage phiC31. In some embodiments, the template binding domain is capable of binding to a template DNA with an affinity between 100 pM-10 nM (e.g., between 100 pM-1 nM or 1 nM-10 nM). In some embodiments, the affinity of a DNA binding domain for its template DNA is measured in vitro, e.g., by thermophoresis, e.g., as described in Asmari et al. Methods 146:107-119 (2018) (incorporated by reference herein in its entirety). In some embodiments, the affinity of a DNA binding domain for its template DNA is measured in cells (e.g., by FRET or ChIP-Seq).

[0195] In some embodiments, the DNA binding domain is associated with the template DNA in vitro with at least 50% template DNA bound in the presence of 10 nM competitor DNA, e.g., as described in Yant et al. Mol Cell Biol 24(20):9239-9247 (2004) (incorporated by reference herein in its entirety). In some embodiments, the DNA binding domain is associated with the template DNA in cells (e.g., in HEK293T cells) at a frequency at least about 5-fold or 10-fold higher than with a scrambled DNA. In some embodiments, the frequency of association between the DNA binding domain and the template DNA or scrambled DNA is measured by ChIP-seq, e.g., as described in He and Pu (2010), supra.

[0196] Target Site

[0197] In some embodiments, after Gene Writing, the target site surrounding the integrated sequence contains a limited number of insertions or deletions, for example, in less than about 50% or 10% of integration events, e.g., as determined by long-read amplicon sequencing of the target site, e.g., as described in Karst et al. (2020) bioRxiv doi.org/10.1101/645903 (incorporated by reference herein in its entirety). For example, indels have been observed after the integration of insert DNA into human genome pseudosites by phiC31 integrase, as described in Thyagaraj an et al Mol Cell Biol 21(12):3926-3934 (2001), the teachings of which are incorporated herein by reference in its entirety. In some embodiments, a Gene Writing system of this invention may result in a genomic modification (e.g., an insertion or deletion) at the target site (e.g., the site of insert DNA integration, e.g., adjacent to the integration of the insert DNA) comprising less than 20 nt, e.g., less than 20, 19, 18, 17, 16, 15, 14, 13, 12, 11, 10, 9, 8, 7, 6, 5, 4, 3, 2, or less than 1 nt of DNA. In some embodiments, a Gene Writing system of this invention may result in an insertion at the target site (e.g., the site of insert DNA integration, e.g., adjacent to the integration of the insert DNA) comprising less than 20 nucleotides or base pairs, e.g., less than 20, 19, 18, 17, 16, 15, 14, 13, 12, 11, 10, 9, 8, 7, 6, 5, 4, 3, 2, or less than 1 nucleotides or base pairs of DNA. In some embodiments, a Gene Writing system of this invention may result in a deletion at the target site (e.g., the site of insert DNA integration, e.g., adjacent to the integration of the insert DNA) comprising less than 20 nucleotides or base pairs, e.g., less than 20, 19, 18, 17, 16, 15, 14, 13, 12, 11, 10, 9, 8, 7, 6, 5, 4, 3, 2, or less than 1 nucleotide or base pair of genomic DNA. In some embodiments, the fraction of insertion or deletion events is lower when a core region, e.g., a central dinucleotide, of a recognition sequence at a target site, e.g., an attB, attP, or pseudosite thereof, comprises 100% identity to a core region, e.g., a central dinucleotide, of a recognition sequence, e.g., an attP or attB site, on the insert DNA. In some embodiments, the fraction of unintended insertion or deletion events is lower, e.g., at least 1.1, 1.2, 1.3, 1.4, 1.5, 1.6, 1.7, 1.8, 1.9, 2.0, 3.0, 4.0, 5.0, 10, 20, 30, 40, 50, 60, 70, 80, 90, or at least 100-fold lower at targeted genomic sites when the central dinucleotide of the recognition sequence at the target site is identical to the central dinucleotide of the recognition sequence in the insert DNA.

[0198] In some embodiments, the target site does not show multiple insertion events, e.g., head-to-tail or head-to-head duplications, e.g., as determined by long-read amplicon sequencing of the target site, e.g., as described in Karst et al. (2020), supra, or by molecular combing (Example 29). In some embodiments, the target site shows less than 100 insert copies at the target site, e.g., 75 insert copies, 50 insert copies, 45 insert copies, 40 insert copies, 35 insert copies, 30 insert copies, 25 insert copies, 20 insert copies, 15 insert copies, 14 insert copies, 13 insert copies, 12 insert copies, 11 insert copies, 10 insert copies, 9 insert copies, 8 insert copies, 7 insert copies, 6 insert copies, 5 insert copies, 4 insert copies, 3 insert copies, 2 insert copies, or a single insert copy. In some embodiments, target sites showing more than one copy of the insert sequence are present in less than 95% of target sites containing inserts, e.g., in less than 90%, 80%, 70%, 60%, 50%, 40%, 30%, 20%, 10%, 9%, 8%, 7%, 6%, 4%, 4%, 3%, 2% or less than 1% of target sites containing inserts, e.g., as determined by long-read amplicon sequencing of the target site, e.g., as described in Karst et al. (2020), supra, or by molecular combing (Example 29). In some embodiments, target sites showing more than two copies of the insert sequence are present in less than 95% of target sites containing inserts, e.g., in less than 90%, 80%, 70%, 60%, 50%, 40%, 30%, 20%, 10%, 9%, 8%, 7%, 6%, 4%, 4%, 3%, 2% or less than 1% of target sites containing inserts, e.g., as determined by long-read amplicon sequencing of the target site, e.g., as described in Karst et al. (2020), supra, or by molecular combing (Example 29). In some embodiments, target sites showing more than three copies of the insert sequence are present in less than 95% of target sites containing inserts, e.g., in less than 90%, 80%, 70%, 60%, 50%, 40%, 30%, 20%, 10%, 9%, 8%, 7%, 6%, 4%, 4%, 3%, 2% or less than 1% of target sites containing inserts, e.g., as determined by long-read amplicon sequencing of the target site, e.g., as described in Karst et al. (2020), supra, or by molecular combing (Example 29). In some embodiments, the target site shows at least 1, 2, 3, 4, 5, 6, 7, 8, 9, 10 or more copies per target site. In some embodiments, target sites showing multiple copies of the insert sequence are present in 1%, 5%, 10%, 20%, 30%, 40%, 50% 60%, 70%, 80%, 90%, 95%, 99% or more of target sites containing inserts, e.g., as determined by long-read amplicon sequencing of the target site, e.g., as described in Karst et al. (2020), supra, or by molecular combing (Example 29). In some embodiments, the copies are concatemers, i.e., are concatemerized. In some embodiments, the target site contains an integrated sequence corresponding to the template DNA (e.g., an entire plasmid, minicircle, or viral vector genome). In some embodiments, the target site contains a completely integrated template molecule. In some embodiments, the target site contains components of the vector DNA, e.g., AAV ITRs. In some embodiments, the target site contains 0, 1, 2, 3, 4, 5, 6, 7, 8, 9, 10 or more ITRs after integration. In some embodiments, at least one ITR is present in at least 1% of target sites after integration, e.g., at least 1%, 5%, 10%, 15%, 20%, 25%, 50%, 60%, 70%, 80%, 90, 95%, 96%, 97%, 98%, or at least 99% of target sites after integration. In some embodiments, at least one ITR is present in less than 50% of target sites after integration, e.g., less than 50%, 40%, 30%, 20%, 10%, 9%, 8%, 7%, 6%, 4%, 4%, 3%, 2% or less than 1% of target sites after integration, e.g., as determined by long-read amplicon sequencing of the target site, e.g., as described in Karst et al. (2020), supra, or by molecular combing (Example 29). In some embodiments, the multiple copies are arranged in head-to-head, tail-to-tail, or head-to-tail arrangements, or a mixture thereof. In some embodiments, e.g., when a template DNA is first excised from a viral vector or plasmid by a first recombination event prior to integration, the target site does not contain insertions comprising DNA exogenous to the recognition site-flanked cassette, e.g., vector DNA, e.g., AAV ITRs, in more than about 50% of events, e.g., in more than about 50%, 40%, 30%, 20%, 10%, 9%, 8%, 7%, 6%, 4%, 4%, 3%, 2% or more than about 1% of events, e.g., as determined by long-read amplicon sequencing of the target site, e.g., as described in Karst et al. (2020), supra, or by molecular combing (Example 29). In some embodiments, the integrated DNA does not comprise any bacterial antibiotic resistance gene.

[0199] In some embodiments, the DNA integrated at a target site by a Gene Writing system described herein comprises terminal hybrid recognition sequences (e.g., a first and/or second parapalindromic sequence, e.g., as described herein), e.g., attL and attR sequences formed by recombination between a recognition site of the insert DNA, e.g., an attP or attB of the insert DNA, and a recognition site in the target DNA, e.g., an attP or attB site or pseudosite thereof. In some embodiments, the integrated DNA comprises one or more ITRs, e.g., 1, 2, 3, 4, or more ITRs, between the terminal hybrid recognition sequences, e.g., attL and attR sequences. In some embodiments, at least 1% of target sites with integrated DNA comprise ITRs between the terminal hybrid recognition sequences, e.g., attL and attR sequences, e.g. at least 1%, 5%, 10%, 20%, 30%, 40%, 50%, 60%, 70%, 80%, or at least 90% of integrated DNA. In some embodiments, the integrated DNA that comprises ITRs between terminal hybrid recognition sequences, e.g., attL and attR sequences, comprises a single copy of insert DNA, e.g., is a monomeric insertion. In some embodiments, a monomeric insertion comprises terminal hybrid recognition sequences, e.g., attL and attR sequences, and lacks any internal ITRs. In some embodiments, a monomeric insertion comprises terminal hybrid recognition sequences, e.g., attL and attR sequences, and a single internal ITR. In some embodiments, a monomeric insertion comprises terminal hybrid recognition sequences, e.g., attL and attR sequences, and multiple internal ITRs, e.g., two internal ITRs. In some embodiments, the integrated DNA that comprises ITRs between terminal hybrid recognition sequences, e.g., attL and attR sequences, comprises multiple copies of insert DNA, e.g., is a concatemeric insertion. In some embodiments, a concatemeric insertion comprises terminal hybrid recognition sequences, e.g., attL and attR sequences, and at least two, e.g., at least 2, 3, or 4 copies of the insert DNA. In some embodiments, insertions comprising terminal hybrid recognition sequences, e.g., attL and attR sequences, that comprise fewer copies of the insert DNA are present at a higher frequency as compared to those with more copies of the insert DNA (e.g., insertions with 1 copy are present at higher frequency than insertions with 2 copies, insertions with 2 copies are present at higher frequency than insertions with 3 copies, or insertions with 1 copy are present at higher frequency than insertions with 3 copies), show a higher frequency of occurrence, e.g., are 1.1, 1.2, 1.3, 1.4, 1.5, 2.0, 2.5, 3.0, 4.0, 5.0, 10, 20, 30, 40, 50, 60, 70, 80, 90, 100, or more times more frequent. In some embodiments, monomeric insertions are present more frequently than dimeric insertions, e.g, are at least 1.1, 1.2, 1.3, 1.4, 1.5, 2.0, 2.5, 3.0, 4.0, 5.0, 10, 20, 30, 40, 50, 60, 70, 80, 90, 100, or more times more frequent than dimeric insertions. In some embodiments, dimeric insertions are present more frequently than trimeric insertions, e.g, are at least 1.1, 1.2, 1.3, 1.4, 1.5, 2.0, 2.5, 3.0, 4.0, 5.0, 10, 20, 30, 40, 50, 60, 70, 80, 90, 100, or more times more frequent than trimeric insertions. In some embodiments, monomeric plus dimeric insertions are present more frequently than concatameric insertions (3 or more insertions), e.g, are at least 1.1, 1.2, 1.3, 1.4, 1.5, 2.0, 2.5, 3.0, 4.0, 5.0, 10, 20, 30, 40, 50, 60, 70, 80, 90, 100, or more times more frequent than concatameric insertions. In some embodiments, a concatemeric insertion comprises terminal hybrid recognition sequences, e.g., attL and attR sequences, and one or more internal recombinase recognition sequences, e.g., 1, 2, 3, 4, or more internal recognition sequences, e.g., attB or attP sequences. In some embodiments, a concatemeric insertion comprises terminal hybrid recognition sequences, e.g., attL and attR sequences, and one or more internal ITRs, e.g., 1, 2, 3, 4, 5, 6 or more internal ITRs. The copy number of insert DNA, recognition sequences, and ITRs, as well as the relative positioning of these components, as described herein, can be determined using molecular combing as described in Example 29 and in Kaykov et al Sci Rep 6:19636 (2016), incorporated herein by reference in its entirety.

[0200] In some embodiments, insertion events may occur in which the integrated DNA does not comprise terminal hybrid recognition sequences, e.g., attL and attR sequences. In some embodiments, integrated DNA may comprise one terminal recognition sequence, e.g., attL or attR sequence. In some embodiments, integrated DNA may not have any terminal hybrid recognition sequences, e.g., attL or attR, e.g., neither terminus of the integrated DNA comprises a hybrid recognition sequence, e.g., attL or attR sequence. In some embodiments, integrated DNA that does not comprise terminal hybrid recognition sequences, e.g., attL or attR sequences, comprises a fragment of an insert DNA (e.g., an incomplete insert DNA, e.g., an insert DNA with an incomplete promoter, gene, or heterologous object sequence). In some embodiments, integrated DNA that does not comprise terminal hybrid recognition sequences, e.g., attL or attR sequences, comprises an incomplete multiple insert DNA sequences, e.g., contains less than 1, more than 1 and less than 2, more than 2 and less than 3, more than 3 and less than 4, or another incomplete multiple number of copies of the complete insert DNA.

[0201] In some embodiments, following the use of a Gene Writing system, newly integrated DNA that comprises terminal hybrid recognition sequences, e.g., attL and attR sequences, is present at a higher frequency in a cell or population of cells, e.g., comprises more than 50%, more than 60%, more than 70%, more than 80%, more than 90%, more than 95%, more than 96%, more than 97%, more than 98%, more than 99%, more than 99.5%, or more than 99.9% of total insertion events, compared to newly integrated DNA that comprises one or fewer terminal hybrid recognition sequences, e.g., attL or attR sequences, as measured by an assay described herein, e.g., long-read sequencing or molecular combing. In some embodiments, following the use of a Gene Writing system, newly integrated DNA that comprises terminal hybrid recognition sequences, e.g., attL and attR sequences, comprises a lower average insert DNA copy number per insertion event, e.g., comprises at least 0.1, 0.2, 0.3, 0.4, 0.5, 0.6, 0.7, 0.8, 0.9, 1.0, 1.5, or 2.0 copies fewer per insertion event on average, as compared to the average insert DNA copy number of integration events that comprise one or fewer terminal hybrid recognition sequences, e.g., attL or attP sequences. In some embodiments, following the use of a Gene Writing system, newly integrated DNA that comprises terminal hybrid recognition sequences, e.g., attL and attR sequences, comprises a higher percentage of complete insert DNA sequences, e.g., comprises at least 0.1×, 0.2×, 0.3×, 0.4×, 0.5×, 0.6×, 0.7×, 0.8×, 0.9×, 1.0×, 1.5×, 2.0×, 3×, 4×, 5×, 6×, 7×, 8×, 9×, 10× or more percent complete insert DNA sequences, as compared to the percentage of insert DNA sequences that comprise one or fewer terminal hybrid recognition sequences, e.g., attL or attP sequences.

[0202] In some embodiments, a Gene Writer described herein is capable of site-specific editing of target DNA, e.g., insertion of template DNA into a target DNA. In some embodiments, a site-specific Gene Writer is capable of generating an edit, e.g., an insertion, that is present at the target site with a higher frequency than any other site in the genome. In some embodiments, a site-specific Gene Writer is capable of generating an edit, e.g., an insertion in a target site at a frequency of at least 2, 3, 4, 5, 10, 50, 100, or 1000-fold that of the frequency at all other sites in the human genome. In some embodiments, the location of integration sites is determined by unidirectional sequencing, e.g., as in Example 18. The incorporation of unique molecular identifiers (UMI) in the adapters or primers used in library preparation allows the quantification of discrete insertion events, which can be compared between on-target insertions and all other insertions to determine the preference for the defined target site. In some embodiments, an inverse PCR approach is used to determine the integration sites targeted by a particular Gene Writer, e.g., as in Example 30.

[0203] In some embodiments, a Gene Writing system is used to edit a target DNA sequence that is present at a single location in the human genome. In some embodiments, a Gene Writing system is used to edit a target DNA sequence that is present at a single location in the human genome on a single homologous chromosome, e.g., is haplotype-specific. In some embodiments, a Gene Writing system is used to edit a target DNA sequence that is present at a single location in the human genome on two homologous chromosomes. In some embodiments, a Gene Writing system is used to edit a target DNA sequence that is present in multiple locations in the genome, e.g., at least 2, 3, 4, 5, 10, 20, 50, 100, 200, 500, 1000, 5000, 10000, 100000, 200000, 500000, 1000000 (e.g., Alu elements) locations in the genome. In some embodiments, a Gene Writing system used herein performs integration at a single target sequence in the human genome, that may be present in one or more locations. In some embodiments, a Gene Writing system used herein performs integration at multiple sequences that are present at least once in the human genome, e.g., recognizes more than 1, e.g., more than 1, 2, 3, 4, 5, 10, 20, 50, or more than 100 sequences, or less than 100, e.g., less than 100, 90, 80, 70, 60, 50, 40, 30, 25, 20, 15, 10, or less than 5 sequences that are present at least once in the human genome. Thus, in some embodiments, a Gene Writer described herein may result in the integration of an insert DNA at at least 1, e.g., at least 1, 2, 3, 4, 5, 6, 7, 8, 9, or at least 10 copies per cell, or less than 10, e.g., less than 10, 9, 8, 7, 6, 5, 4, 3, or less than 2 copies per cell.

[0204] In some embodiments, a Gene Writer system is able to edit a genome without introducing undesirable mutations. In some embodiments, a Gene Writer system is able to edit a genome by inserting a template, e.g., template DNA, into the genome. In some embodiments, the resulting modification in the genome contains minimal mutations relative to the template DNA sequence. In some embodiments, the average error rate of genomic insertions relative to the template DNA is less than 10⁻⁴, 10⁻⁵, or 10⁻⁶ mutations per nucleotide. In some embodiments, the number of mutations relative to a template DNA that is introduced into a target cell averages less than 1, 2, 3, 4, 5, 10, 20, 30, 40, 50, 60, 70, 80, 90, or 100 nucleotides per genome. In some embodiments, the error rate of insertions in a target genome is determined by long-read amplicon sequencing across known target sites, e.g., as described in Karst et al. (2020), supra, and comparing to the template DNA sequence. In some embodiments, errors enumerated by this method include nucleotide substitutions relative to the template sequence. In some embodiments, errors enumerated by this method include nucleotide deletions relative to the template sequence. In some embodiments, errors enumerated by this method include nucleotide insertions relative to the template sequence. In some embodiments, errors enumerated by this method include a combination of one or more of nucleotide substitutions, deletions, or insertions relative to the template sequence.

[0205] Efficiency of integration events can be used as a measure of editing of target sites or target cells by a Gene Writer system. In some embodiments, a Gene Writer system described herein is capable of integrating a heterologous object sequence in a fraction of target sites or target cells. In some embodiments, a Gene Writer system is capable of editing at least 1%, 2%, 5%, 10%, 20%, 30%, 40%, 50%, 60%, 70%, 80%, 90%, 95%, 96%, 97%, 98%, 99%, 99.5%, 99.9% or 100% of target loci as measured by the detection of the edit when amplifying across the target and analyzing with long-read amplicon sequencing, e.g., as described in Karst et al. (2020). In some embodiments, a Gene Writer system is capable of editing cells at an average copy number of at least 0.1, e.g., at least 0.1, 0.5, 1, 2, 3, 4, 5, 10, or 100 copies per genome as normalized to a reference gene, e.g., RPP30, across a population of cells, e.g., as determined by ddPCR with transgene-specific primer-probe sets, e.g., as according to the methods in Lin et al. Hum Gene Ther Methods 27(5):197-208 (2016).

[0206] In some embodiments, the copy number per cell is analyzed by single-cell ddPCR (sc-ddPCR), e.g., as according to the methods of Igarashi et al. Mol Ther Methods Clin Dev 6:8-16 (2017), incorporated herein by reference in its entirety. In some embodiments, at least 1%, e.g., at least 1%, 2%, 5%, 10%, 20%, 30%, 40%, 50%, 60%, 70%, 80%, 90%, 95%, 96%, 97%, 98%, 99%, 99.5%, 99.9% or 100%, of target cells are positive for integration as assessed by sc-ddPCR using transgene-specific primer-probe sets. In some embodiments, the average copy number is at least 0.1, e.g., at least 0.1, 0.5, 1, 2, 3, 4, 5, 10, or 100 copies per cell as measured by sc-ddPCR using transgene-specific primer-probe sets.

[0207] In some embodiments, the target site comprises a pair of nucleic acid sequences, wherein one of the nucleic acid sequences is either a palindrome relative to the other nucleic acid sequence, or has at least 20% (e.g., at least 20%, 25%, 30%, 35%, 40%, 45%, 50%, 55%, 60%, 65%, 70%, 75%, 80%, 85%, 90%, 95%, 96%, 97%, 98%, 99%, or 100%), e.g., at least 50%, sequence identity to a palindrome relative to the other nucleic acid sequence, or has no more than 1, 2, 3, 4, 5, 6, 7, 8, 9, 10, 11, 12, 13, 14, 15, 16, 17, 18, 19, or 20 sequence mismatches relative to the other nucleic acid sequence.

[0208] Insert DNAs

[0209] In some embodiments, an insert DNA as described herein comprises a nucleic acid sequence that can be integrated into a target DNA molecule, e.g., by a recombinase polypeptide (e.g., a serine recombinase polypeptide), e.g., as described herein. The insert DNA typically is able to bind one or more recombinase polypeptides (e.g., a plurality of copies of a recombinase polypeptide) of the system. In some embodiments the insert DNA comprises a region that is capable of binding a recombinase polypeptide (e.g., a recognition sequence as described herein).

[0210] An insert DNA may, in some embodiments, comprise an object sequence for insertion into a target DNA. The object sequence may be coding or non-coding. In some embodiments, the object sequence may contain an open reading frame. In some embodiments the insert DNA comprises a Kozak sequence. In some embodiments the insert DNA comprises an internal ribosome entry site. In some embodiments the insert DNA comprises a self-cleaving peptide such as a T2A or P2A site. In some embodiments the insert DNA comprises a start codon. In some embodiments the insert DNA comprises a splice acceptor site. In some embodiments the insert DNA comprises a splice donor site. In some embodiments the insert DNA comprises a microRNA binding site, e.g., downstream of the stop codon. In some embodiments the insert DNA comprises a polyA tail, e.g., downstream of the stop codon of an open reading frame. In some embodiments the insert DNA comprises one or more exons. In some embodiments the insert DNA comprises one or more introns. In some embodiments the insert DNA comprises a eukaryotic transcriptional terminator. In some embodiments the insert DNA comprises an enhanced translation element or a translation enhancing element. In some embodiments the insert DNA comprises a microRNA sequence, a siRNA sequence, a guide RNA sequence, a piwi RNA sequence. In some embodiments the insert DNA comprises a gene expression unit composed of at least one regulatory region operably linked to an effector sequence. The effector sequence may be a sequence that is transcribed into RNA (e.g., a coding sequence or a non-coding sequence such as a sequence encoding a micro RNA). In some embodiments, the object sequence may contain a non-coding sequence. For example, the insert DNA may comprise a promoter or enhancer sequence. In some embodiments the insert DNA comprises a tissue specific promoter or enhancer, each of which may be unidirectional or bidirectional. In some embodiments the promoter is an RNA polymerase I promoter, RNA polymerase II promoter, or RNA polymerase III promoter. In some embodiments the promoter comprises a TATA element. In some embodiments the promoter comprises a B recognition element. In some embodiments the promoter has one or more binding sites for transcription factors.

[0211] In some embodiments the object sequence of the insert DNA is inserted into a target genome in an endogenous intron. In some embodiments the object sequence of the insert DNA is inserted into a target genome and thereby acts as a new exon. In some embodiments the insertion of the object sequence into the target genome results in replacement of a natural exon or the skipping of a natural exon. In some embodiments the object sequence of the insert DNA is inserted into the target genome in a genomic safe harbor site, such as AAVS1, CCR5, or ROSA26. In some embodiment the object sequence of the insert DNA is added to the genome in an intergenic or intragenic region. In some embodiments the object sequence of the insert DNA is added to the genome 5′ or 3′ within 0.1 kb, 0.25 kb, 0.5 kb, 0.75, kb, 1 kb, 2 kb, 3 kb, 4 kb, 5 kb, 7.5 kb, 10 kb, 15 kb, 20 kb, 25 kb, 50, 75 kb, or 100 kb of an endogenous active gene. In some embodiments the object sequence of the insert DNA is added to the genome 5′ or 3′ within 0.1 kb, 0.25 kb, 0.5 kb, 0.75, kb, 1 kb, 2 kb, 3 kb, 4 kb, 5 kb, 7.5 kb, 10 kb, 15 kb, 20 kb, 25 kb, 50, 75 kb, or 100 kb of an endogenous promoter or enhancer. In some embodiments the object sequence of the insert DNA can be, e.g., 50-50,000 base pairs (e.g., between 50-40,000 bp, between 500-30,000 bp between 500-20,000 bp, between 100-15,000 bp, between 500-10,000 bp, between 50-10,000 bp, between 50-5,000 bp. In some embodiments the object sequence of the insert DNA can be, e.g., 1-50 base pairs.

[0212] In certain embodiments, an insert DNA can be identified, designed, engineered and constructed to contain sequences altering or specifying the genome function of a target cell or target organism, for example by introducing a heterologous coding region into a genome; affecting or causing exon structure/alternative splicing; causing disruption of an endogenous gene; causing transcriptional activation of an endogenous gene; causing epigenetic regulation of an endogenous DNA; causing up- or down-regulation of operably liked genes, etc. In certain embodiments, an insert DNA can be engineered to contain sequences coding for exons and/or transgenes, provide for binding sites to transcription factor activators, repressors, enhancers, etc., and combinations of thereof. In other embodiments, the coding sequence can be further customized with splice acceptor sites, poly-A tails.

[0213] The insert DNA may have some homology to the target DNA. In some embodiments the insert DNA has at least 3, 4, 5, 6, 7, 8, 9, 10 or more bases of exact homology to the target DNA or a portion thereof. In some embodiments, the insert DNA has at least 10, 15, 20, 25, 30, 40, 50, 60, 80, 100, 120, 140, 160, 180, 200 or more bases of at least 50%, 60%, 70%, 80%, 85%, 90%, 95%, 97%, 98%, 99% or 100% homology to the target DNA, or a portion thereof.

[0214] As an alternative to other methods of delivery described herein, in some embodiments, nucleic acid (e.g., encoding a recombinase, or a template nucleic acid, or both) delivered to cells is designed as minicircles, where plasmid backbone sequences not pertaining to Gene Writing™ are removed before administration to cells. Minicircles have been shown to result in higher transfection efficiencies and gene expression as compared to plasmids with backbones containing bacterial parts (e.g., bacterial origin of replication, antibiotic selection cassette) and have been used to improve the efficiency of transposition (Sharma et al. Mol Ther Nucleic Acids 2:E74 (2013)). In some embodiments, the DNA vector encoding the Gene Writer™ polypeptide is delivered as a minicircle. In some embodiments, the DNA vector containing the Gene Writer™ template is delivered as a minicircle. In some embodiments of such alternative means for delivering a nucleic acid, the bacterial parts are flanked by recombination sites, e.g., attP/attB, loxP, FRT sites. In some embodiments, the addition of a cognate recombinase results in intramolecular recombination and excision of the bacterial parts. In some embodiments, the recombinase sites are recognized by phiC31 recombinase. In some embodiments, the recombinase sites are recognized by Cre recombinase. In some embodiments, the recombinase sites are recognized by FLP recombinase. In some embodiments, minicircles are generated in a bacterial production strain, e.g., an E. coli strain stably expressing inducible minicircle assembling enzymes, e.g., a producer strain as according to Kay et al. Nat Biotechnol 28(12):1287-1289 (2010). Minicircle DNA vector preparations and methods of production are described in U.S. Pat. No. 9,233,174, incorporated herein by reference in its entirety.

[0215] In addition to plasmid DNA, minicircles can be generated by excising the desired construct, e.g., recombinase expression cassette or therapeutic expression cassette, from a viral backbone, e.g., an AAV vector. Previously, it has been shown that excision and circularization of the donor sequence from a viral backbone may be important for transposase-mediated integration efficiency (Yant et al. Nat Biotechnol 20(10):999-1005 (2002)). In some embodiments, minicircles are first formulated and then delivered to target cells. In other embodiments, minicircles are formed from a DNA vector (e.g., plasmid DNA, rAAV, scAAV, ceDNA, doggybone DNA) intracellularly by co-delivery of a recombinase, resulting in excision and circularization of the recombinase recognition site-flanked nucleic acid, e.g., a nucleic acid encoding the Gene Writer™ polypeptide, or DNA template, or both. In some embodiments, the same recombinase is used for a first excision event (e.g., intramolecular recombination) and a second integration (e.g., target site integration) event. In some embodiments, the recombination site on an excised circular DNA (e.g., after a first recombination event, e.g., intramolecular recombination) is used as the template recognition site for a second recombination (e.g., target site integration) event.

[0216] In some embodiments, minicircle DNA as described herein is generated by a recombinase excision event and the Gene Writer functions to insert the minicircle DNA by a recombinase integration event. In some embodiments, the excision event and integration event are catalyzed by the same enzyme, e.g., by the same serine recombinase. In some embodiments, the cassette for excision from a vector is flanked by attL and attR sites and the excision event results in the generation of an attB or attP site that is used for integration at a cognate genomic attP or attB site. In some embodiments, the excision event involving attL and attR sites is catalyzed by the addition of a recombination directionality factor (RDF) that enables the Gene Writer recombinase polypeptide to perform the excision. In some embodiments, the Gene Writer recombinase polypeptide functions to catalyze an integration event in the absence of an RDF.

[0217] Linkers

[0218] In some embodiments, domains of the compositions and systems described herein (e.g., the recombinase domain and/or DNA recognition domains of a recombinase polypeptide, e.g., as described herein) may be joined by a linker. A composition described herein comprising a linker element has the general form S1-L-S2, wherein S1 and S2 may be the same or different and represent two domain moieties (e.g., each a polypeptide or nucleic acid domain) associated with one another by the linker. In some embodiments, a linker may connect two polypeptides. In some embodiments, a linker may connect two nucleic acid molecules. In some embodiments, a linker may connect a polypeptide and a nucleic acid molecule. A linker may be a chemical bond, e.g., one or more covalent bonds or non-covalent bonds. A linker may be flexible, rigid, and/or cleavable. In some embodiments, the linker is a peptide linker. Generally, a peptide linker is at least 2, 3, 4, 5, 6, 7, 8, 9, 10 or more amino acids in length, e.g., 2-50 amino acids in length, 2-30 amino acids in length.

[0219] The most commonly used flexible linkers have sequences consisting primarily of stretches of Gly and Ser residues (“GS” linker). Flexible linkers may be useful for joining domains that require a certain degree of movement or interaction and may include small, non-polar (e.g. Gly) or polar (e.g. Ser or Thr) amino acids. Incorporation of Ser or Thr can also maintain the stability of the linker in aqueous solutions by forming hydrogen bonds with the water molecules, and therefore reduce unfavorable interactions between the linker and the other moieties. Examples of such linkers include those having the structure [GGS]^{≥1} or [GGGS]^{≥1} (SEQ ID NO: 3441). Rigid linkers are useful to keep a fixed distance between domains and to maintain their independent functions. Rigid linkers may also be useful when a spatial separation of the domains is critical to preserve the stability or bioactivity of one or more components in the agent. Rigid linkers may have an alpha helix-structure or Pro-rich sequence, (XP)n, with X designating any amino acid, preferably Ala, Lys, or Glu. Cleavable linkers may release free functional domains in vivo. In some embodiments, linkers may be cleaved under specific conditions, such as the presence of reducing reagents or proteases. In vivo cleavable linkers may utilize the reversible nature of a disulfide bond. One example includes a thrombin-sensitive sequence (e.g., PRS) between the two Cys residues. In vitro thrombin treatment of CPRSC results in the cleavage of the thrombin-sensitive sequence, while the reversible disulfide linkage remains intact. Such linkers are known and described, e.g., in Chen et al. 2013. Fusion Protein Linkers: Property, Design and Functionality. Adv Drug Deliv Rev. 65(10): 1357-1369. In vivo cleavage of linkers in compositions described herein may also be carried out by proteases that are expressed in vivo under pathological conditions (e.g. cancer or inflammation), in specific cells or tissues, or constrained within certain cellular compartments. The specificity of many proteases offers slower cleavage of the linker in constrained compartments.

[0220] In some embodiments the amino acid linkers are (or are homologous to) the endogenous amino acids that exist between such domains in a native polypeptide. In some embodiments the endogenous amino acids that exist between such domains are substituted but the length is unchanged from the natural length. In some embodiments, additional amino acid residues are added to the naturally existing amino acid residues between domains.

[0221] In some embodiments, the amino acid linkers are designed computationally or screened to maximize protein function (Anad et al., FEBS Letters, 587:19, 2013).

[0222] Additional Gene Writer Characteristics

[0223] In some embodiments, the Gene Writer system may result in complete writing without requiring endogenous host factors. In some embodiments, the system may result in complete writing without the need for DNA repair. In some embodiments, the system may result in complete writing without eliciting a DNA damage response.

[0224] In some embodiments, the system does not require DNA repair by the NHEJ pathway, homologous recombination repair pathway, base excision repair pathway, or any combination thereof. Participation by a DNA repair pathway can be assayed, for example, via the application of DNA repair pathway inhibitors or DNA repair pathway deficient cell lines. For example, when applying DNA repair pathway inhibitors, PrestoBlue cell viability assay can be performed first to determine the toxicity of the inhibitors and whether any normalization should be applied. SCR7 is an inhibitor for NHEJ, which can be applied at a series of dilutions during Gene Writer™ delivery. PARP protein is a nuclear enzyme that binds as homodimers to both single- and double-strand breaks. Thus, its inhibitors can be used in the test of relevant DNA repair pathways, including homologous recombination repair pathway and base excision repair pathway. The experiment procedure is the same with that of SCR7. Cell lines with deficient core proteins of nucleotide excision repair (NER) pathway can be used to test the effect of NER on Gene Writing™. After the delivery of the Gene Writer™ system into the cell, ddPCR can used to evaluate the insertion of a heterologous object sequence in the context of inhibition of DNA repair pathways. Sequencing analysis can also be performed to evaluate whether certain DNA repair pathways play a role. In some embodiments, Gene Writing™ into the genome is not decreased by the knockdown of a DNA repair pathway described herein. In some embodiments, Gene Writing™ into the genome is not decreased by more than 50% by the knockdown of the DNA repair pathway.

### Circular RNAs in Gene Writing Systems

[0225] It is contemplated that it may be useful to employ circular and/or linear RNA states during the formulation, delivery, or Gene Writing reaction within the target cell. Thus, in some embodiments of any of the aspects described herein, a Gene Writing system comprises one or more circular RNAs (circRNAs). In some embodiments of any of the aspects described herein, a Gene Writing system comprises one or more linear RNAs. In some embodiments, a nucleic acid as described herein (e.g., a nucleic acid molecule encoding a Gene Writer polypeptide, or both) is a circRNA. In some embodiments, a circular RNA molecule encodes the Gene Writer polypeptide. In some embodiments, the circRNA molecule encoding the Gene Writer polypeptide is delivered to a host cell. In some embodiments, a circular RNA molecule encodes a recombinase, e.g., as described herein. In some embodiments, the circRNA molecule encoding the recombinase is delivered to a host cell. In some embodiments, the circRNA molecule encoding the Gene Writer polypeptide is linearized (e.g., in the host cell) prior to translation.

[0226] Circular RNAs (circRNAs) have been found to occur naturally in cells and have been found to have diverse functions, including both non-coding and protein coding roles in human cells. It has been shown that a circRNA can be engineered by incorporating a self-splicing intron into an RNA molecule (or DNA encoding the RNA molecule) that results in circularization of the RNA, and that an engineered circRNA can have enhanced protein production and stability (Wesselhoeft et al. Nature Communications 2018). In some embodiments, the Gene Writer™ polypeptide is encoded as circRNA. In certain embodiments, the template nucleic acid is a DNA, such as a dsDNA or ssDNA.

[0227] In some embodiments, the circRNA comprises one or more ribozyme sequence. In some embodiments, the ribozyme sequence is activated for autocleavage, e.g., in a host cell, e.g., thereby resulting in linearization of the circRNA. In some embodiments, the ribozyme is activated when the concentration of magnesium reaches a sufficient level for cleavage, e.g., in a host cell. In some embodiments the circRNA is maintained in a low magnesium environment prior to delivery to the host cell. In some embodiments, the ribozyme is a protein-responsive ribozyme. In some embodiments, the ribozyme is a nucleic acid-responsive ribozyme.

[0228] In some embodiments, the circRNA is linearized in the nucleus of a target cell. In some embodiments, linearization of a circRNA in the nucleus of a cell involves components present in the nucleus of the cell, e.g., to activate a cleavage event. For example, the B2 and ALU retrotransposons contain self-cleaving ribozymes whose activity is enhanced by interaction with the Polycomb protein, EZH2 (Hernandez et al. PNAS 117(1):415-425 (2020)). Thus, in some embodiments, a ribozyme, e.g., a ribozyme from a B2 or ALU element, that is responsive to a nuclear element, e.g., a nuclear protein, e.g., a genome-interacting protein, e.g., an epigenetic modifier, e.g., EZH2, is incorporated into a circRNA, e.g., of a Gene Writing system. In some embodiments, nuclear localization of the circRNA results in an increase in autocatalytic activity of the ribozyme and linearization of the circRNA.

[0229] In some embodiments, an inducible ribozyme (e.g., in a circRNA as described herein) is created synthetically, for example, by utilizing a protein ligand-responsive aptamer design. A system for utilizing the satellite RNA of tobacco ringspot virus hammerhead ribozyme with an MS2 coat protein aptamer has been described (Kennedy et al. Nucleic Acids Res 42(19):12306-12321 (2014), incorporated herein by reference in its entirety) that results in activation of the ribozyme activity in the presence of the MS2 coat protein. In embodiments, such a system responds to protein ligand localized to the cytoplasm or the nucleus. In some embodiments the protein ligand is not MS2. Methods for generating RNA aptamers to target ligands have been described, for example, based on the systematic evolution of ligands by exponential enrichment (SELEX) (Tuerk and Gold, Science 249(4968):505-510 (1990); Ellington and Szostak, Nature 346(6287):818-822 (1990); the methods of each of which are incorporated herein by reference) and have, in some instances, been aided by in silico design (Bell et al. PNAS 117(15):8486-8493, the methods of which are incorporated herein by reference). Thus, in some embodiments, an aptamer for a target ligand is generated and incorporated into a synthetic ribozyme system, e.g., to trigger ribozyme-mediated cleavage and circRNA linearization, e.g., in the presence of the protein ligand. In some embodiments, circRNA linearization is triggered in the cytoplasm, e.g., using an aptamer that associates with a ligand in the cytoplasm. In some embodiments, circRNA linearization is triggered in the nucleus, e.g., using an aptamer that associates with a ligand in the nucleus. In embodiments, the ligand in to the nucleus comprises an epigenetic modifier or a transcription factor. In some embodiments the ligand that triggers linearization is present at higher levels in on-target cells than off-target cells.

[0230] It is further contemplated that a nucleic acid-responsive ribozyme system can be employed for circRNA linearization. For example, biosensors that sense defined target nucleic acid molecules to trigger ribozyme activation are described, e.g., in Penchovsky (Biotechnology Advances 32(5):1015-1027 (2014), incorporated herein by reference). By these methods, a ribozyme naturally folds into an inactive state and is only activated in the presence of a defined target nucleic acid molecule (e.g., an RNA molecule). In some embodiments, a circRNA of a Gene Writing system comprises a nucleic acid-responsive ribozyme that is activated in the presence of a defined target nucleic acid, e.g., an RNA, e.g., an mRNA, miRNA, guide RNA, gRNA, sgRNA, ncRNA, lncRNA, tRNA, snRNA, or mtRNA. In some embodiments the nucleic acid that triggers linearization is present at higher levels in on-target cells than off-target cells.

[0231] In some embodiments of any of the aspects herein, a Gene Writing system incorporates one or more ribozymes with inducible specificity to a target tissue or target cell of interest, e.g., a ribozyme that is activated by a ligand or nucleic acid present at higher levels in a target tissue or target cell of interest. In some embodiments, the Gene Writing system incorporates a ribozyme with inducible specificity to a subcellular compartment, e.g., the nucleus, nucleolus, cytoplasm, or mitochondria. In some embodiments, the ribozyme that is activated by a ligand or nucleic acid present at higher levels in the target subcellular compartment. In some embodiments, an RNA component of a Gene Writing system is provided as circRNA, e.g., that is activated by linearization. In some embodiments, linearization of a circRNA encoding a Gene Writing polypeptide activates the molecule for translation. In some embodiments, a signal that activates a circRNA component of a Gene Writing system is present at higher levels in on-target cells or tissues, e.g., such that the system is specifically activated in these cells.

[0232] In some embodiments, an RNA component of a Gene Writing system is provided as a circRNA that is inactivated by linearization. In some embodiments, a circRNA encoding the Gene Writer polypeptide is inactivated by cleavage and degradation. In some embodiments, a circRNA encoding the Gene Writing polypeptide is inactivated by cleavage that separates a translation signal from the coding sequence of the polypeptide. In some embodiments, a signal that inactivates a circRNA component of a Gene Writing system is present at higher levels in off-target cells or tissues, such that the system is specifically inactivated in these cells.

### Evolved Variants of Gene Writers

[0233] In some embodiments, the invention provides evolved variants of Gene Writers. Evolved variants can, in some embodiments, be produced by mutagenizing a reference Gene Writer, or one of the fragments or domains comprised therein. In some embodiments, one or more of the domains (e.g., the catalytic domain or DNA binding domain (e.g., target binding domain or template binding domain), including, for example, sequence-guided DNA binding elements) is evolved. One or more of such evolved variant domains can, in some embodiments, be evolved alone or together with other domains. An evolved variant domain or domains may, in some embodiments, be combined with unevolved cognate component(s) or evolved variants of the cognate component(s), e.g., which may have been evolved in either a parallel or serial manner.

[0234] In some embodiments, the process of mutagenizing a reference Gene Writer, or fragment or domain thereof, comprises mutagenizing the reference Gene Writer or fragment or domain thereof. In embodiments, the mutagenesis comprises a continuous evolution method (e.g., PACE) or non-continuous evolution method (e.g., PANCE), e.g., as described herein. In some embodiments, the evolved Gene Writer, or a fragment or domain thereof (e.g., a DNA binding domain, e.g., a target binding domain or a template binding domain), comprises one or more amino acid variations introduced into its amino acid sequence relative to the amino acid sequence of the reference Gene Writer, or fragment or domain thereof. In embodiments, amino acid sequence variations may include one or more mutated residues (e.g., conservative substitutions, non-conservative substitutions, or a combination thereof) within the amino acid sequence of a reference Gene Writer, e.g., as a result of a change in the nucleotide sequence encoding the gene writer that results in, e.g., a change in the codon at any particular position in the coding sequence, the deletion of one or more amino acids (e.g., a truncated protein), the insertion of one or more amino acids, or any combination of the foregoing. The evolved variant Gene Writer may include variants in one or more components or domains of the Gene Writer (e.g., variants introduced into a catalytic domain, DNA binding domain, or combinations thereof).

[0235] In some aspects, the invention provides Gene Writers, systems, kits, and methods using or comprising an evolved variant of a Gene Writer, e.g., employs an evolved variant of a Gene Writer or a Gene Writer produced or produceable by PACE or PANCE. In embodiments, the unevolved reference Gene Writer is a Gene Writer as disclosed herein.

[0236] The term “phage-assisted continuous evolution (PACE),” as used herein, generally refers to continuous evolution that employs phage as viral vectors. Examples of PACE technology have been described, for example, in International PCT Application No. PCT/US 2009/056194, filed Sep. 8, 2009, published as WO 2010/028347 on Mar. 11, 2010; International PCT Application, PCT/US2011/066747, filed Dec. 22, 2011, published as WO 2012/088381 on Jun. 28, 2012; U.S. Pat. No. 9,023,594, issued May 5, 2015; U.S. Pat. No. 9,771,574, issued Sep. 26, 2017; U.S. Pat. No. 9,394,537, issued Jul. 19, 2016; International PCT Application, PCT/US2015/012022, filed Jan. 20, 2015, published as WO 2015/134121 on Sep. 11, 2015; U.S. Pat. No. 10,179,911, issued Jan. 15, 2019; and International PCT Application, PCT/US2016/027795, filed Apr. 15, 2016, published as WO 2016/168631 on Oct. 20, 2016, the entire contents of each of which are incorporated herein by reference.

[0237] The term “phage-assisted non-continuous evolution (PANCE),” as used herein, generally refers to non-continuous evolution that employs phage as viral vectors. Examples of PANCE technology have been described, for example, in Suzuki T. et al, Crystal structures reveal an elusive functional domain of pyrrolysyl-tRNA synthetase, Nat Chem Biol. 13(12): 1261-1266 (2017), incorporated herein by reference in its entirety. Briefly, PANCE is a technique for rapid in vivo directed evolution using serial flask transfers of evolving selection phage (SP), which contain a gene of interest to be evolved, across fresh host cells (e.g., E. coli cells). Genes inside the host cell may be held constant while genes contained in the SP continuously evolve. Following phage growth, an aliquot of infected cells may be used to transfect a subsequent flask containing host E. coli. This process can be repeated and/or continued until the desired phenotype is evolved, e.g., for as many transfers as desired.

[0238] Methods of applying PACE and PANCE to Gene Writers may be readily appreciated by the skilled artisan by reference to, inter alia, the foregoing references. Additional exemplary methods for directing continuous evolution of genome-modifying proteins or systems, e.g., in a population of host cells, e.g., using phage particles, can be applied to generate evolved variants of Gene Writers, or fragments or subdomains thereof. Non-limiting examples of such methods are described in International PCT Application, PCT/US2009/056194, filed Sep. 8, 2009, published as WO 2010/028347 on Mar. 11, 2010; International PCT Application, PCT/US2011/066747, filed Dec. 22, 2011, published as WO 2012/088381 on Jun. 28, 2012; U.S. Pat. No. 9,023,594, issued May 5, 2015; U.S. Pat. No. 9,771,574, issued Sep. 26, 2017; U.S. Pat. No. 9,394,537, issued Jul. 19, 2016; International PCT Application, PCT/US2015/012022, filed Jan. 20, 2015, published as WO 2015/134121 on Sep. 11, 2015; U.S. Pat. No. 10,179,911, issued Jan. 15, 2019; International Application No. PCT/US2019/37216, filed Jun. 14, 2019, International Patent Publication WO 2019/023680, published Jan. 31, 2019, International PCT Application, PCT/US2016/027795, filed Apr. 15, 2016, published as WO 2016/168631 on Oct. 20, 2016, and International Patent Publication No. PCT/US2019/47996, filed Aug. 23, 2019, each of which is incorporated herein by reference in its entirety.

[0239] In some non-limiting illustrative embodiments, a method of evolution of a evolved variant Gene Writer, of a fragment or domain thereof, comprises: (a) contacting a population of host cells with a population of viral vectors comprising the gene of interest (the starting Gene Writer or fragment or domain thereof), wherein: (1) the host cell is amenable to infection by the viral vector; (2) the host cell expresses viral genes required for the generation of viral particles; (3) the expression of at least one viral gene required for the production of an infectious viral particle is dependent on a function of the gene of interest; and/or (4) the viral vector allows for expression of the protein in the host cell, and can be replicated and packaged into a viral particle by the host cell. In some embodiments, the method comprises (b) contacting the host cells with a mutagen, using host cells with mutations that elevate mutation rate (e.g., either by carrying a mutation plasmid or some genome modification—e.g., proofing-impaired DNA polymerase, SOS genes, such as UmuC, UmuD′, and/or RecA, which mutations, if plasmid-bound, may be under control of an inducible promoter), or a combination thereof. In some embodiments, the method comprises (c) incubating the population of host cells under conditions allowing for viral replication and the production of viral particles, wherein host cells are removed from the host cell population, and fresh, uninfected host cells are introduced into the population of host cells, thus replenishing the population of host cells and creating a flow of host cells. In some embodiments, the cells are incubated under conditions allowing for the gene of interest to acquire a mutation. In some embodiments, the method further comprises (d) isolating a mutated version of the viral vector, encoding an evolved gene product (e.g., an evolved variant Gene Writer, or fragment or domain thereof), from the population of host cells.

[0240] The skilled artisan will appreciate a variety of features employable within the above-described framework. For example, in some embodiments, the viral vector or the phage is a filamentous phage, for example, an M13 phage, e.g., an M13 selection phage. In certain embodiments, the gene required for the production of infectious viral particles is the M13 gene III (gIII) In embodiments, the phage may lack a functional gIII, but otherwise comprise gI, gII, gIV, gV, gVI, gVII, gVIII, gIX, and a gX. In some embodiments, the generation of infectious VSV particles involves the envelope protein VSV-G. Various embodiments can use different retroviral vectors, for example, Murine Leukemia Virus vectors, or Lentiviral vectors. In embodiments, the retroviral vectors can efficiently be packaged with VSV-G envelope protein, e.g., as a substitute for the native envelope protein of the virus.

[0241] In some embodiments, host cells are incubated according to a suitable number of viral life cycles, e.g., at least 10, at least 20, at least 30, at least 40, at least 50, at least 100, at least 200, at least 300, at least 400, at least, 500, at least 600, at least 700, at least 800, at least 900, at least 1000, at least 1250, at least 1500, at least 1750, at least 2000, at least 2500, at least 3000, at least 4000, at least 5000, at least 7500, at least 10000, or more consecutive viral life cycles, which in on illustrative and non-limiting examples of M13 phage is 10-20 minutes per virus life cycle. Similarly, conditions can be modulated to adjust the time a host cell remains in a population of host cells, e.g., about 10, about 11, about 12, about 13, about 14, about 15, about 16, about 17, about 18, about 19, about 20, about 21, about 22, about 23, about 24, about 25, about 30, about 35, about 40, about 45, about 50, about 55, about 60, about 70, about 80, about 90, about 100, about 120, about 150, or about 180 minutes. Host cell populations can be controlled in part by density of the host cells, or, in some embodiments, the host cell density in an inflow, e.g., 10³ cells/ml, about 10⁴ cells/ml, about 10⁵ cells/ml, about 5-10⁵ cells/ml, about 10⁶ cells/ml, about 5-10⁶ cells/ml, about 10⁷ cells/ml, about 5-10⁷ cells/ml, about 10⁸ cells/ml, about 5-10⁸ cells/ml, about 10⁹ cells/ml, about 5·10⁹ cells/ml, about 10¹⁰ cells/ml, or about 5·10¹⁰ cells/ml.

### Nucleic Acids

### Promoters

[0242] In some embodiments, one or more promoter or enhancer elements are operably linked to a nucleic acid encoding a Gene Writer polypeptide or a template nucleic acid, e.g., that controls expression of the heterologous object sequence. In certain embodiments, the one or more promoter or enhancer elements comprise cell-type or tissue specific elements. In some embodiments, the promoter or enhancer is the same or derived from the promoter or enhancer that naturally controls expression of the heterologous object sequence. For example, the ornithine transcarbomylase promoter and enhancer may be used to control expression of the ornithine transcarbomylase gene in a system or method provided by the invention for correcting ornithine transcarbomylase deficiencies. In some embodiments, the promoter is a promoter of Table 4B or a functional fragment or variant thereof.

[0243] Exemplary tissue specific promoters that are commercially available can be found, for example, at a uniform resource locator (e.g., https://www.invivogen.com/tissue-specific-promoters). In some embodiments, a promoter is a native promoter or a minimal promoter, e.g., which consists of a single fragment from the 5′ region of a given gene. In some embodiments, a native promoter comprises a core promoter and its natural 5′ UTR. In some embodiments, the 5′ UTR comprises an intron. In other embodiments, these include composite promoters, which combine promoter elements of different origins or were generated by assembling a distal enhancer with a minimal promoter of the same origin. In some embodiments, a tissue-specific expression-control sequence(s) comprises one or more of the sequences in Table 2 or Table 3 of PCT Publication No. WO2020014209 (incorporated herein by reference in its entirety).

[0244] Exemplary cell or tissue specific promoters are provided in the tables, below, and exemplary nucleic acid sequences encoding them are known in the art and can be readily accessed using a variety of resources, such as the NCBI database, including RefSeq, as well as the Eukaryotic Promoter Database (http://epd.epfl.ch//index.php).

TABLE 4B
Exemplary cell or tissue-specific promoters

| Promoter | Target cells |
|---|---|
| B29 Promoter | B cells |
| CD14 Promoter | Monocytic Cells |
| CD43 Promoter | Leukocytes and platelets |
| CD45 Promoter | Hematopoeitic cells |
| CD68 promoter | macrophages |
| Desmin promoter | muscle cells |
| Elastase-1 promoter | pancreatic acinar cells |
| Endoglin promoter | endothelial cells |
| fibronectin | differentiating cells, healing |
| promoter | tissue |
| Flt-1 promoter | endothelial cells |
| GFAP promoter | Astrocytes |
| GPIIB promoter | megakaryocytes |
| ICAM-2 Promoter | Endothelial cells |
| INF-Beta promoter | Hematopoeitic cells |
| Mb promoter | muscle cells |
| Nphs1 promoter | podocytes |
| OG-2 promoter | Osteoblasts, Odonblasts |
| SP-B promoter | Lung |
| Syn1 promoter | Neurons |
| WASP promoter | Hematopoeitic cells |
| SV40/bAlb promoter | Liver |
| SV40/bAlb promoter | Liver |
| SV40/Cd3 promoter | Leukocytes and platelets |
| SV40/CD45 promoter | hematopoeitic cells |
| NSE/RU5′ promoter | Mature Neurons |

TABLE 4C
Additional exemplary cell or tissue-specific promoters

| Promoter | Gene Description | Gene Specificity |
|---|---|---|
| APOA2 | Apolipoprotein A-II | Hepatocytes (from hepatocyte |
| | | progenitors) |
| SERPINA | Serpin peptidase inhibitor, clade A | Hepatocytes |
| 1 (hAAT) | (alpha-1 | (from definitive endoderm |
| | antiproteinase, antitrypsin), member 1 | stage) |
| | (also named alpha 1 anti-tryps in) | |
| CYP3A | Cytochrome P450, family 3, | Mature Hepatocytes |
| | subfamily A, polypeptide | |
| MIR122 | MicroRNA 122 | Hepatocytes |
| | | (from early stage embryonic |
| | | liver cells) |
| | | and endoderm |

Pancreatic specific promoters

| | | |
|---|---|---|
| INS | Insulin | Pancreatic beta cells |
| | | (from definitive endoderm stage) |
| IRS2 | Insulin receptor substrate 2 | Pancreatic beta cells |
| Pdx1 | Pancreatic and duodenal | Pancreas |
| | homeobox 1 | (from definitive endoderm stage) |
| Alx3 | Aristaless-like homeobox 3 | Pancreatic beta cells |
| | | (from definitive endoderm stage) |
| Ppy | Pancreatic polypeptide | PP pancreatic cells |
| | | (gamma cells) |

Cardiac specific promoters

| | | |
|---|---|---|
| Myh6 | Myosin, heavy chain 6, cardiac | Late differentiation marker of cardiac |
| (aMHC) | muscle, alpha | muscle cells (atrial specificity) |
| MYL2 | Myosin, light chain 2, regulatory, | Late differentiation marker of cardiac |
| (MLC-2v) | cardiac, slow | muscle cells (ventricular specificity) |
| ITNNl3 | Troponin I type 3 (cardiac) | Cardiomyocytes |
| (cTnl) | | (from immature state) |
| ITNNl3 | Troponin I type 3 (cardiac) | Cardiomyocytes |
| (cTnl) | | (from immature state) |
| NPPA | Natriuretic peptide precursor A (also | Atrial specificity in adult cells |
| (ANF) | named Atrial Natriuretic Factor) | |
| Slc8a1 | Solute carrier family 8 | Cardiomyocytes from early |
| (Ncx1) | (sodium/calcium exchanger), member | developmental stages |
| | 1 | |

CNS specific promoters

| | | |
|---|---|---|
| SYN1 | Synapsin I | Neurons |
| (hSyn) | | |
| GFAP | Glial fibrillary acidic protein | Astrocytes |
| INA | lnternexin neuronal intermediate | Neuroprogenitors |
| | filament protein, alpha (a-internexin) | |
| NES | Nestin | Neuroprogenitors and ectoderm |
| MOBP | Myelin-associated oligodendrocyte | Oligodendrocytes |
| | basic protein | |
| MBP | Myelin basic protein | Oligodendrocytes |
| TH | Tyrosine hydroxylase | Dopaminergic neurons |
| FOXA2 | Forkhead box A2 | Dopaminergic neurons (also used as a |
| (HNF3 | | marker of endoderm) |
| beta) | | |

Skin specific promoters

| | | |
|---|---|---|
| FLG | Filaggrin | Keratinocytes from granular layer |
| K14 | Keratin 14 | Keratinocytes from granular |
| | | and basal layers |
| TGM3 | Transglutaminase 3 | Keratinocytes from granular layer |

Immune cell specific promoters

| | | |
|---|---|---|
| ITGAM | lntegrin, alpha M (complement | Monocytes, macrophages, granulocytes, |
| (CD11B) | component 3 receptor 3 subunit) | natural killer cells |

Urogential cell specific promoters

| | | |
|---|---|---|
| Pbsn | Probasin | Prostatic epithelium |
| Upk2 | Uroplakin 2 | Bladder |
| Sbp | Spermine binding protein | Prostate |
| Fer1l4 | Fer-1-like 4 | Bladder |

Endothelial cell specific promoters

| | | |
|---|---|---|
| ENG | Endoglin | Endothelial cells |

Pluripotent and embryonic cell specific promoters

| | | |
|---|---|---|
| Oct4 | POU class 5 homeobox 1 | Pluripotent cells |
| (POU5F1) | | (germ cells, ES cells, iPS cells) |
| NANOG | Nanog homeobox | Pluripotent cells |
| | | (ES cells, iPS cells) |
| Synthetic | Synthetic promoter based on a Oct-4 | Pluripotent cells (ES cells, iPS cells) |
| Oct4 | core enhancer element | |
| T | Brachyury | Mesoderm |
| brachyury | | |
| NES | Nestin | Neuroprogenitors and Ectoderm |
| SOX17 | SRY (sex determining region Y)-box | Endoderm |
| | 17 | |
| FOXA2 | Forkhead box A2 | Endoderm (also used as a marker of |
| (HNFJ | | dopaminergic neurons) |
| beta) | | |
| MIR122 | MicroRNA 122 | Endoderm and hepatocytes |
| | | (from early stage embryonic liver cells~ |

[0245] Depending on the host/vector system utilized, any of a number of suitable transcription and translation control elements, including constitutive and inducible promoters, transcription enhancer elements, transcription terminators, etc. may be used in the expression vector (see e.g., Bitter et al. (1987) Methods in Enzymology, 153:516-544; incorporated herein by reference in its entirety).

[0246] In some embodiments, a nucleic acid encoding a Gene Writer or template nucleic acid is operably linked to a control element, e.g., a transcriptional control element, such as a promoter. The transcriptional control element may, in some embodiment, be functional in either a eukaryotic cell, e.g., a mammalian cell; or a prokaryotic cell (e.g., bacterial or archaeal cell). In some embodiments, a nucleotide sequence encoding a polypeptide is operably linked to multiple control elements, e.g., that allow expression of the nucleotide sequence encoding the polypeptide in both prokaryotic and eukaryotic cells.

[0247] For illustration purposes, examples of spatially restricted promoters include, but are not limited to, neuron-specific promoters, adipocyte-specific promoters, cardiomyocyte-specific promoters, smooth muscle-specific promoters, photoreceptor-specific promoters, etc. Neuron-specific spatially restricted promoters include, but are not limited to, a neuron-specific enolase (NSE) promoter (see, e.g., EMBL HSENO2, X51956); an aromatic amino acid decarboxylase (AADC) promoter, a neurofilament promoter (see, e.g., GenBank HUMNFL, L04147); a synapsin promoter (see, e.g., GenBank HUMSYNIB, M55301); a thy-1 promoter (see, e.g., Chen et al. (1987) Cell 51:7-19; and Llewellyn, et al. (2010) Nat. Med. 16(10):1161-1166); a serotonin receptor promoter (see, e.g., GenBank S62283); a tyrosine hydroxylase promoter (TH) (see, e.g., Oh et al. (2009) Gene Ther 16:437; Sasaoka et al. (1992) Mol. Brain Res. 16:274; Boundy et al. (1998) J. Neurosci. 18:9989; and Kaneda et al. (1991) Neuron 6:583-594); a GnRH promoter (see, e.g., Radovick et al. (1991) Proc. Natl. Acad. Sci. USA 88:3402-3406); an L7 promoter (see, e.g., Oberdick et al. (1990) Science 248:223-226); a DNMT promoter (see, e.g., Bartge et al. (1988) Proc. Natl. Acad. Sci. USA 85:3648-3652); an enkephalin promoter (see, e.g., Comb et al. (1988) EMBO J. 17:3793-3805); a myelin basic protein (MBP) promoter; a Ca2+-calmodulin-dependent protein kinase II-alpha (CamKIIa) promoter (see, e.g., Mayford et al. (1996) Proc. Natl. Acad. Sci. USA 93:13250; and Casanova et al. (2001) Genesis 31:37); a CMV enhancer/platelet-derived growth factor-0 promoter (see, e.g., Liu et al. (2004) Gene Therapy 11:52-60); and the like.

[0248] Adipocyte-specific spatially restricted promoters include, but are not limited to, the aP2 gene promoter/enhancer, e.g., a region from −5.4 kb to +21 bp of a human aP2 gene (see, e.g., Tozzo et al. (1997) Endocrinol. 138:1604; Ross et al. (1990) Proc. Natl. Acad. Sci. USA 87:9590; and Pavjani et al. (2005) Nat. Med. 11:797); a glucose transporter-4 (GLUT4) promoter (see, e.g., Knight et al. (2003) Proc. Natl. Acad. Sci. USA 100:14725); a fatty acid translocase (FAT/CD36) promoter (see, e.g., Kuriki et al. (2002) Biol. Pharm. Bull. 25:1476; and Sato et al. (2002) J. Biol. Chem. 277:15703); a stearoyl-CoA desaturase-1 (SCD1) promoter (Tabor et al. (1999) J. Biol. Chem. 274:20603); a leptin promoter (see, e.g., Mason et al. (1998) Endocrinol. 139:1013; and Chen et al. (1999) Biochem. Biophys. Res. Comm. 262:187); an adiponectin promoter (see, e.g., Kita et al. (2005) Biochem. Biophys. Res. Comm. 331:484; and Chakrabarti (2010) Endocrinol. 151:2408); an adipsin promoter (see, e.g., Platt et al. (1989) Proc. Natl. Acad. Sci. USA 86:7490); a resistin promoter (see, e.g., Seo et al. (2003) Molec. Endocrinol. 17:1522); and the like.

[0249] Cardiomyocyte-specific spatially restricted promoters include, but are not limited to, control sequences derived from the following genes: myosin light chain-2, α-myosin heavy chain, AE3, cardiac troponin C, cardiac actin, and the like. Franz et al. (1997) Cardiovasc. Res. 35:560-566; Robbins et al. (1995) Ann. N.Y. Acad. Sci. 752:492-505; Linn et al. (1995) Circ. Res. 76:584-591; Parmacek et al. (1994) Mol. Cell. Biol. 14:1870-1885; Hunter et al. (1993) Hypertension 22:608-617; and Sartorelli et al. (1992) Proc. Natl. Acad. Sci. USA 89:4047-4051.

[0250] Smooth muscle-specific spatially restricted promoters include, but are not limited to, an SM22α promoter (see, e.g., Akyürek et al. (2000) Mol. Med. 6:983; and U.S. Pat. No. 7,169,874); a smoothelin promoter (see, e.g., WO 2001/018048); an α-smooth muscle actin promoter; and the like. For example, a 0.4 kb region of the SM22α promoter, within which lie two CArG elements, has been shown to mediate vascular smooth muscle cell-specific expression (see, e.g., Kim, et al. (1997) Mol. Cell. Biol. 17, 2266-2278; Li, et al., (1996) J. Cell Biol. 132, 849-859; and Moessler, et al. (1996) Development 122, 2415-2425).

[0251] Photoreceptor-specific spatially restricted promoters include, but are not limited to, a rhodopsin promoter; a rhodopsin kinase promoter (Young et al. (2003) Ophthalmol. Vis. Sci. 44:4076); a beta phosphodiesterase gene promoter (Nicoud et al. (2007) J. Gene Med. 9:1015); a retinitis pigmentosa gene promoter (Nicoud et al. (2007) supra); an interphotoreceptor retinoid-binding protein (IRBP) gene enhancer (Nicoud et al. (2007) supra); an IRBP gene promoter (Yokoyama et al. (1992) Exp Eye Res. 55:225); and the like.

[0252] Nonlimiting Exemplary Cell-Specific Promoters

[0253] Cell-specific promoters known in the art may be used to direct expression of a Gene Writer protein, e.g., as described herein. Nonlimiting exemplary mammalian cell-specific promoters have been characterized and used in mice expressing Cre recombinase in a cell-specific manner. Certain nonlimiting exemplary mammalian cell-specific promoters are listed in Table 1 of U.S. Pat. No. 9,845,481, incorporated herein by reference.

[0254] In some embodiments, the cell-specific promoter is a promoter that is active in plants. Many exemplary cell-specific plant promoters are known in the art. See, e.g., U.S. Pat. Nos. 5,097,025; 5,783,393; 5,880,330; 5,981,727; 7,557,264; 6,291,666; 7,132,526; and 7,323,622; and U.S. Publication Nos. 2010/0269226; 2007/0180580; 2005/0034192; and 2005/0086712, which are incorporated by reference herein in their entireties for any purpose.

[0255] In some embodiments, a vector as described herein comprises an expression cassette. The term “expression cassette”, as used herein, refers to a nucleic acid construct comprising nucleic acid elements sufficient for the expression of the nucleic acid molecule of the instant invention. Typically, an expression cassette comprises the nucleic acid molecule of the instant invention operatively linked to a promoter sequence. The term “operatively linked” refers to the association of two or more nucleic acid fragments on a single nucleic acid fragment so that the function of one is affected by the other. For example, a promoter is operatively linked with a coding sequence when it is capable of affecting the expression of that coding sequence (e.g., the coding sequence is under the transcriptional control of the promoter). Encoding sequences can be operatively linked to regulatory sequences in sense or antisense orientation. In certain embodiments, the promoter is a heterologous promoter. The term “heterologous promoter”, as used herein, refers to a promoter that is not found to be operatively linked to a given encoding sequence in nature. In certain embodiments, an expression cassette may comprise additional elements, for example, an intron, an enhancer, a polyadenylation site, a woodchuck response element (WRE), and/or other elements known to affect expression levels of the encoding sequence. A “promoter” typically controls the expression of a coding sequence or functional RNA. In certain embodiments, a promoter sequence comprises proximal and more distal upstream elements and can further comprise an enhancer element. An “enhancer” can typically stimulate promoter activity and may be an innate element of the promoter or a heterologous element inserted to enhance the level or tissue-specificity of a promoter. In certain embodiments, the promoter is derived in its entirety from a native gene. In certain embodiments, the promoter is composed of different elements derived from different naturally occurring promoters. In certain embodiments, the promoter comprises a synthetic nucleotide sequence. It will be understood by those skilled in the art that different promoters will direct the expression of a gene in different tissues or cell types, or at different stages of development, or in response to different environmental conditions or to the presence or the absence of a drug or transcriptional co-factor. Ubiquitous, cell-type-specific, tissue-specific, developmental stage-specific, and conditional promoters, for example, drug-responsive promoters (e.g tetracycline-responsive promoters) are well known to those of skill in the art. Examples of promoter include, but are not limited to, the phosphoglycerate kinase (PKG) promoter, CAG (composite of the CMV enhancer the chicken beta actin promoter (CBA) and the rabbit beta globin intron), NSE (neuronal specific enolase), synapsin or NeuN promoters, the SV40 early promoter, mouse mammary tumor virus LTR promoter; adenovirus major late promoter (Ad MLP); a herpes simplex virus (HSV) promoter, a cytomegalovirus (CMV) promoter such as the CMV immediate early promoter region (CMVIE), SFFV promoter, rous sarcoma virus (RSV) promoter, synthetic promoters, hybrid promoters, and the like. Other promoters can be of human origin or from other species, including from mice. Common promoters include, e.g., the human cytomegalovirus (CMV) immediate early gene promoter, the SV40 early promoter, the Rous sarcoma virus long terminal repeat, [beta]-actin, rat insulin promoter, the phosphoglycerate kinase promoter, the human alpha-1 antitrypsin (hAAT) promoter, the transthyretin promoter, the TBG promoter and other liver-specific promoters, the desmin promoter and similar muscle-specific promoters, the EF1-alpha promoter, the CAG promoter and other constitutive promoters, hybrid promoters with multi-tissue specificity, promoters specific for neurons like synapsin and glyceraldehyde-3-phosphate dehydrogenase promoter, all of which are promoters well known and readily available to those of skill in the art, can be used to obtain high-level expression of the coding sequence of interest. In addition, sequences derived from non-viral genes, such as the murine metallothionein gene, will also find use herein. Such promoter sequences are commercially available from, e.g., Stratagene (San Diego, Calif.). Additional exemplary promoter sequences are described, for example, in WO2018213786A1 (incorporated by reference herein in its entirety).

[0256] In some embodiments, the apolipoprotein E enhancer (ApoE) or a functional fragment thereof is used, e.g., to drive expression in the liver. In some embodiments, two copies of the ApoE enhancer or a functional fragment thereof is used. In some embodiments, the ApoE enhancer or functional fragment thereof is used in combination with a promoter, e.g., the human alpha-1 antitrypsin (hAAT) promoter.

[0257] In some embodiments, the regulatory sequences impart tissue-specific gene expression capabilities. In some cases, the tissue-specific regulatory sequences bind tissue-specific transcription factors that induce transcription in a tissue specific manner. Various tissue-specific regulatory sequences (e.g., promoters, enhancers, etc.) are known in the art. Exemplary tissue-specific regulatory sequences include, but are not limited to, the following tissue-specific promoters: a liver-specific thyroxin binding globulin (TBG) promoter, a insulin promoter, a glucagon promoter, a somatostatin promoter, a pancreatic polypeptide (PPY) promoter, a synapsin-1 (Syn) promoter, a creatine kinase (MCK) promoter, a mammalian desmin (DES) promoter, a α-myosin heavy chain (a-MHC) promoter, or a cardiac Troponin T (cTnT) promoter. Other exemplary promoters include Beta-actin promoter, hepatitis B virus core promoter, Sandig et al., Gene Ther., 3:1002-9 (1996); alpha-fetoprotein (AFP) promoter, Arbuthnot et al., Hum. Gene Ther., 7:1503-14 (1996)), bone osteocalcin promoter (Stein et al., Mol. Biol. Rep., 24:185-96 (1997)); bone sialoprotein promoter (Chen et al., J. Bone Miner. Res., 11:654-64 (1996)), CD2 promoter (Hansal et al., J. Immunol., 161:1063-8 (1998); immunoglobulin heavy chain promoter; T cell receptor α-chain promoter, neuronal such as neuron-specific enolase (NSE) promoter (Andersen et al., Cell. Mol. Neurobiol., 13:503-15 (1993)), neurofilament light-chain gene promoter (Piccioli et al., Proc. Natl. Acad. Sci. USA, 88:5611-5 (1991)), and the neuron-specific vgf gene promoter (Piccioli et al., Neuron, 15:373-84 (1995)), and others. Additional exemplary promoter sequences are described, for example, in U.S. patent Ser. No. 10/300,146 (incorporated herein by reference in its entirety). In some embodiments, a tissue-specific regulatory element, e.g., a tissue-specific promoter, is selected from one known to be operably linked to a gene that is highly expressed in a given tissue, e.g., as measured by RNA-seq or protein expression data, or a combination thereof. Methods for analyzing tissue specificity by expression are taught in Fagerberg et al. Mol Cell Proteomics 13(2):397-406 (2014), which is incorporated herein by reference in its entirety.

[0258] In some embodiments, a vector described herein is a multicistronic expression construct. Multicistronic expression constructs include, for example, constructs harboring a first expression cassette, e.g. comprising a first promoter and a first encoding nucleic acid sequence, and a second expression cassette, e.g. comprising a second promoter and a second encoding nucleic acid sequence. Such multicistronic expression constructs may, in some instances, be particularly useful in the delivery of non-translated gene products, such as hairpin RNAs, together with a polypeptide, for example, a gene writer and gene writer template. In some embodiments, multicistronic expression constructs may exhibit reduced expression levels of one or more of the included transgenes, for example, because of promoter interference or the presence of incompatible nucleic acid elements in close proximity. If a multicistronic expression construct is part of a viral vector, the presence of a self-complementary nucleic acid sequence may, in some instances, interfere with the formation of structures necessary for viral reproduction or packaging.

[0259] In some embodiments, the sequence encodes an RNA with a hairpin. In some embodiments, the hairpin RNA is a guide RNA, a template RNA, shRNA, or a microRNA. In some embodiments, the first promoter is an RNA polymerase I promoter. In some embodiments, the first promoter is an RNA polymerase II promoter. In some embodiments, the second promoter is an RNA polymerase III promoter. In some embodiments, the second promoter is a U6 or H1 promoter. In some embodiments, the nucleic acid construct comprises the structure of AAV construct B1 or B2.

[0260] Without wishing to be bound by theory, multicistronic expression constructs may not achieve optimal expression levels as compared to expression systems containing only one cistron. One of the suggested causes of lower expression levels achieved with multicistronic expression constructs comprising two or more promoter elements is the phenomenon of promoter interference (see, e.g., Curtin J A, Dane A P, Swanson A, Alexander I E, Ginn S L. Bidirectional promoter interference between two widely used internal heterologous promoters in a late-generation lentiviral construct. Gene Ther. 2008 March; 15(5):384-90; and Martin-Duque P, Jezzard S, Kaftansis L, Vassaux G. Direct comparison of the insulating properties of two genetic elements in an adenoviral vector containing two different expression cassettes. Hum Gene Ther. 2004 October; 15(10):995-1002; both references incorporated herein by reference for disclosure of promoter interference phenomenon). In some embodiments, the problem of promoter interference may be overcome, e.g., by producing multicistronic expression constructs comprising only one promoter driving transcription of multiple encoding nucleic acid sequences separated by internal ribosomal entry sites, or by separating cistrons comprising their own promoter with transcriptional insulator elements. In some embodiments, single-promoter driven expression of multiple cistrons may result in uneven expression levels of the cistrons. In some embodiments, a promoter cannot efficiently be isolated and isolation elements may not be compatible with some gene transfer vectors, for example, some retroviral vectors.

### MicroRNAs

[0261] MicroRNAs (miRNAs) and other small interfering nucleic acids generally regulate gene expression via target RNA transcript cleavage/degradation or translational repression of the target messenger RNA (mRNA). miRNAs may, in some instances, be natively expressed, typically as final 19-25 non-translated RNA products. miRNAs generally exhibit their activity through sequence-specific interactions with the 3′ untranslated regions (UTR) of target mRNAs. These endogenously expressed miRNAs may form hairpin precursors that are subsequently processed into an miRNA duplex, and further into a mature single stranded miRNA molecule. This mature miRNA generally guides a multiprotein complex, miRISC, which identifies target 3′ UTR regions of target mRNAs based upon their complementarity to the mature miRNA. Useful transgene products may include, for example, miRNAs or miRNA binding sites that regulate the expression of a linked polypeptide. A non-limiting list of miRNA genes; the products of these genes and their homologues are useful as transgenes or as targets for small interfering nucleic acids (e.g., miRNA sponges, antisense oligonucleotides), e.g., in methods such as those listed in U.S. Ser. No. 10/300,146, 22:25-25:48, incorporated by reference. In some embodiments, one or more binding sites for one or more of the foregoing miRNAs are incorporated in a transgene, e.g., a transgene delivered by a rAAV vector, e.g., to inhibit the expression of the transgene in one or more tissues of an animal harboring the transgene. In some embodiments, a binding site may be selected to control the expression of a transgene in a tissue specific manner. For example, binding sites for the liver-specific miR-122 may be incorporated into a transgene to inhibit expression of that transgene in the liver. Additional exemplary miRNA sequences are described, for example, in U.S. patent Ser. No. 10/300,146 (incorporated herein by reference in its entirety).

[0262] A miR inhibitor or miRNA inhibitor is generally an agent that blocks miRNA expression and/or processing. Examples of such agents include, but are not limited to, microRNA antagonists, microRNA specific antisense, microRNA sponges, and microRNA oligonucleotides (double-stranded, hairpin, short oligonucleotides) that inhibit miRNA interaction with a Drosha complex. MicroRNA inhibitors, e.g., miRNA sponges, can be expressed in cells from transgenes (e.g., as described in Ebert, M. S. Nature Methods, Epub Aug. 12, 2007; incorporated by reference herein in its entirety). In some embodiments, microRNA sponges, or other miR inhibitors, are used with the AAVs. microRNA sponges generally specifically inhibit miRNAs through a complementary heptameric seed sequence. In some embodiments, an entire family of miRNAs can be silenced using a single sponge sequence. Other methods for silencing miRNA function (derepression of miRNA targets) in cells will be apparent to one of ordinary skill in the art.

[0263] In some embodiments, a miRNA as described herein comprises a sequence listed in Table 4 of PCT Publication No. WO2020014209, incorporated herein by reference. Also incorporated herein by reference are the listing of exemplary miRNA sequences from WO2020014209.

[0264] In some embodiments, it is advantageous to silence a component of a Gene Writing system (e.g., nucleic acid encoding a Gene Writer polypeptide, nucleic acid encoding a transgene) in a portion of cells. In some embodiments, it is advantageous to restrict expression of a component of a Gene Writing system to select cell types within a tissue of interest.

[0265] For example, it is known that in a given tissue, e.g., liver, macrophages and immune cells, e.g., Kupffer cells in the liver, may engage in uptake of a delivery vehicle for one or more components of a Gene Writing system. In some embodiments, at least one binding site for at least one miRNA highly expressed in macrophages and immune cells, e.g., Kupffer cells, is included in at least one component of a Gene Writing system, e.g., nucleic acid encoding a Gene Writing polypeptide or a transgene. In some embodiments, a miRNA that targets the one or more binding sites is listed in a table referenced herein, e.g., miR-142, e.g., mature miRNA hsa-miR-142-5p or hsa-miR-142-3p.

[0266] In some embodiments, there may be a benefit to decreasing Gene Writer levels and/or Gene Writer activity in cells in which Gene Writer expression or overexpression of a transgene may have a toxic effect. For example, it has been shown that delivery of a transgene overexpression cassette to dorsal root ganglion neurons may result in toxicity of a gene therapy (see Hordeaux et al Sci Transl Med 12(569):eaba9188 (2020), incorporated herein by reference in its entirety). In some embodiments, at least one miRNA binding site may be incorporated into a nucleic acid component of a Gene Writing system to reduce expression of a system component in a neuron, e.g., a dorsal root ganglion neuron. In some embodiments, the at least one miRNA binding site incorporated into a nucleic acid component of a Gene Writing system to reduce expression of a system component in a neuron is a binding site of miR-182, e.g., mature miRNA hsa-miR-182-5p or hsa-miR-182-3p. In some embodiments, the at least one miRNA binding site incorporated into a nucleic acid component of a Gene Writing system to reduce expression of a system component in a neuron is a binding site of miR-183, e.g., mature miRNA hsa-miR 5p or hsa-miR-183-3p. In some embodiments, combinations of miRNA binding sites may be used to enhance the restriction of expression of one or more components of a Gene Writing system to a tissue or cell type of interest.

[0267] The table below provides exemplary miRNAs and corresponding expressing cells, e.g., a miRNA for which one can, in some embodiments, incorporate binding sites (complementary sequences) in the transgene or polypeptide nucleic acid, e.g., to decrease expression in that off-target cell.

TABLE 4D
Exemplary miRNA from off-target
cells and tissues

| Silenced | miRNA | Mature | miRNA | SEQ ID |
|---|---|---|---|---|
| cell type | name | miRNA | sequence | NO |
| Kupffer | miR- | hsa- | cauaaagua | 3790 |
| cells | 142 | miR- | gaaagcacu | |
| | | 142- | acu | |
| | | 5p | | |
| Kupffer | miR- | hsa- | uguaguguu | 3791 |
| cells | 142 | miR- | uccuacuuu | |
| | | 142- | augga | |
| | | 3p | | |
| Dorsal | miR- | hsa- | uuuggcaau | 3792 |
| root | 182 | miR- | gguagaacu | |
| ganglion | | 182- | cacacu | |
| neurons | | 5p | | |
| Dorsal | miR- | hsa- | ugguucuag | 3793 |
| root | 182 | miR- | acuugccaa | |
| ganglion | | 182- | cua | |
| neurons | | 3p | | |
| Dorsal | miR- | hsa- | uauggcacu | 3794 |
| root | 183 | miR- | gguagaauu | |
| ganglion | | 183- | cacu | |
| neurons | | 5p | | |
| Dorsal | miR- | hsa- | gugaauuac | 3795 |
| root | 183 | miR- | cgaagggcc | |
| ganglion | | 183- | auaa | |
| neurons | | 3p | | |

### 5′ UTR and 3′ UTR

[0268] In certain embodiments, a nucleic acid comprising an open reading frame encoding a Gene Writer polypeptide (e.g., as described herein) comprises a 5′ UTR and/or a 3′ UTR. In embodiments, a 5′ UTR and 3′ UTR for protein expression, e.g., mRNA (or DNA encoding the RNA) for a Gene Writer polypeptide or heterologous object sequence, comprise optimized expression sequences. In some embodiments, the 5′ UTR comprises GGGAAAUAAGAGAGAAAAGAAGAGUAAGAAGAAAUAUAAGAGCCACC (SEQ ID NO: 3475) and/or the 3′ UTR comprising UGAUAAUAGGCUGGAGCCUCGGUGGCCAUGCUUCUUGCCCCUUGGGCCUCCCCCC AGCCCCUCCUCCCCUUCCUGCACCCGUACCCCCGUGGUCUUUGAAUAAAGUCUGA (SEQ ID NO: 3476), e.g., as described in Richner et al. Cell 168(6): P1114-1125 (2017), the sequences of which are incorporated herein by reference.

[0269] In some embodiments, an open reading frame of a Gene Writer system, e.g., an ORF of an mRNA (or DNA encoding an mRNA) encoding a Gene Writer polypeptide or one or more ORFs of an mRNA (or DNA encoding an mRNA) of a heterologous object sequence, is flanked by a 5′ and/or 3′ untranslated region (UTR) that enhances the expression thereof. In some embodiments, the 5′ UTR of an mRNA component (or transcript produced from a DNA component) of the system comprises the sequence 5′-GGGAAAUAAGAGAGAAAAGAAGAGUAAGAAGAAAUAUAAGAGCCACC-3′ (SEQ ID NO: 3475). In some embodiments, the 3′ UTR of an mRNA component (or transcript produced from a DNA component) of the system comprises the sequence 5′-UGAUAAUAGGCUGGAGCCUCGGUGGCCAUGCUUCUUGCCCCUUGGGCCUCCCCCC AGCCCCUCCUCCCCUUCCUGCACCCGUACCCCCGUGGUCUUUGAAUAAAGUCUGA-3′ (SEQ ID NO: 3476). This combination of 5′ UTR and 3′ UTR has been shown to result in desirable expression of an operably linked ORF by Richner et al. Cell 168(6): P1114-1125 (2017), the teachings and sequences of which are incorporated herein by reference. In some embodiments, a system described herein comprises a DNA encoding a transcript, wherein the DNA comprises the corresponding 5′ UTR and 3′ UTR sequences, with T substituting for U in the above-listed sequence). In some embodiments, a DNA vector used to produce an RNA component of the system further comprises a promoter upstream of the 5′ UTR for initiating in vitro transcription, e.g, a T7, T3, or SP6 promoter. The 5′ UTR above begins with GGG, which is a suitable start for optimizing transcription using T7 RNA polymerase. For tuning transcription levels and altering the transcription start site nucleotides to fit alternative 5′ UTRs, the teachings of Davidson et al. Pac Symp Biocomput 433-443 (2010) describe T7 promoter variants, and the methods of discovery thereof, that fulfill both of these traits.

### Viral Vectors and Components Thereof

[0270] Viruses are a useful source of delivery vehicles for the systems described herein, in addition to a source of relevant enzymes or domains as described herein, e.g., as sources of recombinases and DNA binding domains used herein, e.g., Cre recombinase, lambda integrase, or the DNA binding domains from AAV Rep proteins. Some enzymes may have multiple activities. In some embodiments, the virus used as a Gene Writer delivery system or a source of components thereof may be selected from a group as described by Baltimore Bacteriol Rev 35(3):235-241 (1971).

[0271] In some embodiments, the virus is selected from a Group I virus, e.g., is a DNA virus and packages dsDNA into virions. In some embodiments, the Group I virus is selected from, e.g., Adenoviruses, Herpesviruses, Poxviruses.

[0272] In some embodiments, the virus is selected from a Group II virus, e.g., is a DNA virus and packages ssDNA into virions. In some embodiments, the Group II virus is selected from, e.g., Parvoviruses. In some embodiments, the parvovirus is a dependoparvovirus, e.g., an adeno-associated virus (AAV).

[0273] In some embodiments, the virus is selected from a Group III virus, e.g., is an RNA virus and packages dsRNA into virions. In some embodiments, the Group III virus is selected from, e.g., Reoviruses. In some embodiments, one or both strands of the dsRNA contained in such virions is a coding molecule able to serve directly as mRNA upon transduction into a host cell, e.g., can be directly translated into protein upon transduction into a host cell without requiring any intervening nucleic acid replication or polymerization steps.

[0274] In some embodiments, the virus is selected from a Group IV virus, e.g., is an RNA virus and packages ssRNA(+) into virions. In some embodiments, the Group IV virus is selected from, e.g., Coronaviruses, Picornaviruses, Togaviruses. In some embodiments, the ssRNA(+) contained in such virions is a coding molecule able to serve directly as mRNA upon transduction into a host cell, e.g., can be directly translated into protein upon transduction into a host cell without requiring any intervening nucleic acid replication or polymerization steps.

[0275] In some embodiments, the virus is selected from a Group V virus, e.g., is an RNA virus and packages ssRNA(−) into virions. In some embodiments, the Group V virus is selected from, e.g., Orthomyxoviruses, Rhabdoviruses. In some embodiments, an RNA virus with an ssRNA(−) genome also carries an enzyme inside the virion that is transduced to host cells with the viral genome, e.g., an RNA-dependent RNA polymerase, capable of copying the ssRNA(−) into ssRNA(+) that can be translated directly by the host.

[0276] In some embodiments, the virus is selected from a Group VI virus, e.g., is a retrovirus and packages ssRNA(+) into virions. In some embodiments, the Group VI virus is selected from, e.g., Retroviruses. In some embodiments, the retrovirus is a lentivirus, e.g., HIV-1, HIV-2, SIV, BIV. In some embodiments, the retrovirus is a spumavirus, e.g., a foamy virus, e.g., HFV, SFV, BFV. In some embodiments, the ssRNA(+) contained in such virions is a coding molecule able to serve directly as mRNA upon transduction into a host cell, e.g., can be directly translated into protein upon transduction into a host cell without requiring any intervening nucleic acid replication or polymerization steps. In some embodiments, the ssRNA(+) is first reverse transcribed and copied to generate a dsDNA genome intermediate from which mRNA can be transcribed in the host cell. In some embodiments, an RNA virus with an ssRNA(+) genome also carries an enzyme inside the virion that is transduced to host cells with the viral genome, e.g., an RNA-dependent DNA polymerase, capable of copying the ssRNA(+) into dsDNA that can be transcribed into mRNA and translated by the host.

[0277] In some embodiments, the virus is selected from a Group VII virus, e.g., is a retrovirus and packages dsRNA into virions. In some embodiments, the Group VII virus is selected from, e.g., Hepadnaviruses. In some embodiments, one or both strands of the dsRNA contained in such virions is a coding molecule able to serve directly as mRNA upon transduction into a host cell, e.g., can be directly translated into protein upon transduction into a host cell without requiring any intervening nucleic acid replication or polymerization steps. In some embodiments, one or both strands of the dsRNA contained in such virions is first reverse transcribed and copied to generate a dsDNA genome intermediate from which mRNA can be transcribed in the host cell. In some embodiments, an RNA virus with a dsRNA genome also carries an enzyme inside the virion that is transduced to host cells with the viral genome, e.g., an RNA-dependent DNA polymerase, capable of copying the dsRNA into dsDNA that can be transcribed into mRNA and translated by the host.

[0278] In some embodiments, virions used to deliver nucleic acid in this invention may also carry enzymes involved in the process of Gene Writing. For example, a virion may contain a recombinase domain that is delivered into a host cell along with the nucleic acid. In some embodiments, a template nucleic acid may be associated with a Gene Writer polypeptide within a virion, such that both are co-delivered to a target cell upon transduction of the nucleic acid from the viral particle. In some embodiments, the nucleic acid in a virion may comprise DNA, e.g., linear ssDNA, linear dsDNA, circular ssDNA, circular dsDNA, minicircle DNA, dbDNA, ceDNA. In some embodiments, the nucleic acid in a virion may comprise RNA, e.g., linear ssRNA, linear dsRNA, circular ssRNA, circular dsRNA. In some embodiments, a viral genome may circularize upon transduction into a host cell, e.g., a linear ssRNA molecule may undergo a covalent linkage to form a circular ssRNA, a linear dsRNA molecule may undergo a covalent linkage to form a circular dsRNA or one or more circular ssRNA. In some embodiments, a viral genome may replicate by rolling circle replication in a host cell. In some embodiments, a viral genome may comprise a single nucleic acid molecule, e.g., comprise a non-segmented genome. In some embodiments, a viral genome may comprise two or more nucleic acid molecules, e.g., comprise a segmented genome. In some embodiments, a nucleic acid in a virion may be associated with one or proteins. In some embodiments, one or more proteins in a virion may be delivered to a host cell upon transduction. In some embodiments, a natural virus may be adapted for nucleic acid delivery by the addition of virion packaging signals to the target nucleic acid, wherein a host cell is used to package the target nucleic acid containing the packaging signals.

[0279] In some embodiments, a virion used as a delivery vehicle may comprise a commensal human virus. In some embodiments, a virion used as a delivery vehicle may comprise an anellovirus, the use of which is described in WO2018232017A1, which is incorporated herein by reference in its entirety.

### Production of Compositions and Systems

[0280] As will be appreciated by one of skill, methods of designing and constructing nucleic acid constructs and proteins or polypeptides (such as the systems, constructs and polypeptides described herein) are routine in the art. Generally, recombinant methods may be used. See, in general, Smales & James (Eds.), Therapeutic Proteins: Methods and Protocols (Methods in Molecular Biology), Humana Press (2005); and Crommelin, Sindelar & Meibohm (Eds.), Pharmaceutical Biotechnology: Fundamentals and Applications, Springer (2013). Methods of designing, preparing, evaluating, purifying and manipulating nucleic acid compositions are described in Green and Sambrook (Eds.), Molecular Cloning: A Laboratory Manual (Fourth Edition), Cold Spring Harbor Laboratory Press (2012).

[0281] Exemplary methods for producing a therapeutic pharmaceutical protein or polypeptide described herein involve expression in mammalian cells, although recombinant proteins can also be produced using insect cells, yeast, bacteria, or other cells under control of appropriate promoters. Mammalian expression vectors may comprise non-transcribed elements such as an origin of replication, a suitable promoter, and other 5′ or 3′ flanking non-transcribed sequences, and 5′ or 3′ non-translated sequences such as necessary ribosome binding sites, a polyadenylation site, splice donor and acceptor sites, and termination sequences. DNA sequences derived from the SV40 viral genome, for example, SV40 origin, early promoter, splice, and polyadenylation sites may be used to provide other genetic elements required for expression of a heterologous DNA sequence. Appropriate cloning and expression vectors for use with bacterial, fungal, yeast, and mammalian cellular hosts are described in Green & Sambrook, Molecular Cloning: A Laboratory Manual (Fourth Edition), Cold Spring Harbor Laboratory Press (2012).

[0282] Various mammalian cell culture systems can be employed to express and manufacture recombinant protein. Examples of mammalian expression systems include CHO, COS, HEK293, HeLA, and BHK cell lines. Processes of host cell culture for production of protein therapeutics are described in Zhou and Kantardjieff (Eds.), Mammalian Cell Cultures for Biologics Manufacturing (Advances in Biochemical Engineering/Biotechnology), Springer (2014). Compositions described herein may include a vector, such as a viral vector, e.g., a lentiviral vector, encoding a recombinant protein. In some embodiments, a vector, e.g., a viral vector, may comprise a nucleic acid encoding a recombinant protein.

[0283] Purification of protein therapeutics is described in Franks, Protein Biotechnology: Isolation, Characterization, and Stabilization, Humana Press (2013); and in Cutler, Protein Purification Protocols (Methods in Molecular Biology), Humana Press (2010).

[0284] The disclosure is directed, in part, to comparisons of nucleic acid and amino acid sequences with reference sequences or one another to determine % identity or a number of mismatches between said sequences. A person of skill in the art will understand that a number of methods and/or tools are available to make such determinations, including NCBI's BLAST and pairwise alignment tools that perform global sequence alignment of two input sequences (e.g., using the Needleman-Wunsch alignment algorithm) such as the European Bioinformatics Institute (EBI) and European Molecular Biology Laboratory (EMBL) EMBOSS Needle tool.

[0285] RNAs (e.g., a gRNA or an mRNA, e.g., an mRNA encoding a GeneWriter) may also be produced as described herein. In some embodiments, RNA segments may be produced by chemical synthesis. In some embodiments, RNA segments may be produced by in vitro transcription of a nucleic acid template, e.g., by providing an RNA polymerase to act on a cognate promoter of a DNA template to produce an RNA transcript. In some embodiments, in vitro transcription is performed using, e.g., a T7, T3, or SP6 RNA polymerase, or a derivative thereof, acting on a DNA, e.g., dsDNA, ssDNA, linear DNA, plasmid DNA, linear DNA amplicon, linearized plasmid DNA, e.g., encoding the RNA segment, e.g., under transcriptional control of a cognate promoter, e.g., a T7, T3, or SP6 promoter. In some embodiments, a combination of chemical synthesis and in vitro transcription is used to generate the RNA segments for assembly. In embodiments, the gRNA is produced by chemical synthesis and the heterologous object sequence segment is produced by in vitro transcription. Without wishing to be bound by theory, in vitro transcription may be better suited for the production of longer RNA molecules. In some embodiments, reaction temperature for in vitro transcription may be lowered, e.g., be less than 37° C. (e.g., between 0-10C, 10-20C, or 20-30C), to result in a higher proportion of full-length transcripts (see Krieg Nucleic Acids Res 18:6463 (1990), which is herein incorporated by reference in its entirety). In some embodiments, a protocol for improved synthesis of long transcripts is employed to synthesize a long RNA, e.g., an RNA greater than 5 kb, such as the use of e.g., T7 RiboMAX Express, which can generate 27 kb transcripts in vitro (Thiel et al. J Gen Virol 82(6):1273-1281 (2001)). In some embodiments, modifications to RNA molecules as described herein may be incorporated during synthesis of RNA segments (e.g., through the inclusion of modified nucleotides or alternative binding chemistries), following synthesis of RNA segments through chemical or enzymatic processes, following assembly of one or more RNA segments, or a combination thereof.

[0286] In some embodiments, an mRNA of the system (e.g., an mRNA encoding a Gene Writer polypeptide) is synthesized in vitro using T7 polymerase-mediated DNA-dependent RNA transcription from a linearized DNA template, where UTP is optionally substituted with 1-methylpseudoUTP. In some embodiments, the transcript incorporates 5′ and 3′ UTRs, e.g., GGGAAAUAAGAGAGAAAAGAAGAGUAAGAAGAAAUAUAAGAGCCACC (SEQ ID NO: 3475) and UGAUAAUAGGCUGGAGCCUCGGUGGCCAUGCUUCUUGCCCCUUGGGCCUCCCCCC AGCCCCUCCUCCCCUUCCUGCACCCGUACCCCCGUGGUCUUUGAAUAAAGUCUGA (SEQ ID NO: 3476), or functional fragments or variants thereof, and optionally includes a poly-A tail, which can be encoded in the DNA template or added enzymatically following transcription. In some embodiments, a donor methyl group, e.g., S-adenosylmethionine, is added to a methylated capped RNA with cap 0 structure to yield a cap 1 structure that increases mRNA translation efficiency (Richner et al. Cell 168(6): P1114-1125 (2017)).

[0287] In some embodiments, the transcript from a T7 promoter starts with a GGG motif. In some embodiments, a transcript from a T7 promoter does not start with a GGG motif. It has been shown that a GGG motif at the transcriptional start, despite providing superior yield, may lead to T7 RNAP synthesizing a ladder of poly(G) products as a result of slippage of the transcript on the three C residues in the template strand from +1 to +3 (Imburgio et al. Biochemistry 39(34):10419-10430 (2000). For tuning transcription levels and altering the transcription start site nucleotides to fit alternative 5′ UTRs, the teachings of Davidson et al. Pac Symp Biocomput 433-443 (2010) describe T7 promoter variants, and the methods of discovery thereof, that fulfill both of these traits.

[0288] In some embodiments, RNA segments may be connected to each other by covalent coupling. In some embodiments, an RNA ligase, e.g., T4 RNA ligase, may be used to connect two or more RNA segments to each other. When a reagent such as an RNA ligase is used, a 5′ terminus is typically linked to a 3′ terminus. In some embodiments, if two segments are connected, then there are two possible linear constructs that can be formed (i.e., (1) 5′-Segment 1-Segment 2-3′ and (2) 5′-Segment 2-Segment 1-3′). In some embodiments, intramolecular circularization can also occur. Both of these issues can be addressed, for example, by blocking one 5′ terminus or one 3′ terminus so that RNA ligase cannot ligate the terminus to another terminus. In embodiments, if a construct of 5′-Segment 1-Segment 2-3′ is desired, then placing a blocking group on either the 5′ end of Segment 1 or the 3′ end of Segment 2 may result in the formation of only the correct linear ligation product and/or prevent intramolecular circularization. Compositions and methods for the covalent connection of two nucleic acid (e.g., RNA) segments are disclosed, for example, in US20160102322A1 (incorporated herein by reference in its entirety), along with methods including the use of an RNA ligase to directionally ligate two single-stranded RNA segments to each other.

[0289] One example of an end blocker that may be used in conjunction with, for example, T4 RNA ligase, is a dideoxy terminator. T4 RNA ligase typically catalyzes the ATP-dependent ligation of phosphodiester bonds between 5′-phosphate and 3′-hydroxyl termini. In some embodiments, when T4 RNA ligase is used, suitable termini must be present on the termini being ligated. One means for blocking T4 RNA ligase on a terminus comprises failing to have the correct terminus format. Generally, termini of RNA segments with a 5-hydroxyl or a 3′-phosphate will not act as substrates for T4 RNA ligase.

[0290] Additional exemplary methods that may be used to connect RNA segments is by click chemistry (e.g., as described in U.S. Pat. Nos. 7,375,234 and 7,070,941, and US Patent Publication No. 2013/0046084, the entire disclosures of which are incorporated herein by reference). For example, one exemplary click chemistry reaction is between an alkyne group and an azide group (see FIG. 11 of US20160102322A1, which is incorporated herein by reference in its entirety). Any click reaction may potentially be used to link RNA segments (e.g., Cu-azide-alkyne, strain-promoted-azide-alkyne, staudinger ligation, tetrazine ligation, photo-induced tetrazole-alkene, thiol-ene, NHS esters, epoxides, isocyanates, and aldehyde-aminooxy). In some embodiments, ligation of RNA molecules using a click chemistry reaction is advantageous because click chemistry reactions are fast, modular, efficient, often do not produce toxic waste products, can be done with water as a solvent, and/or can be set up to be stereospecific.

[0291] In some embodiments, RNA segments may be connected using an Azide-Alkyne Huisgen Cycloaddition. reaction, which is typically a 1,3-dipolar cycloaddition between an azide and a terminal or internal alkyne to give a 1,2,3-triazole for the ligation of RNA segments. Without wishing to be bound by theory, one advantage of this ligation method may be that this reaction can initiated by the addition of required Cu(I) ions. Other exemplary mechanisms by which RNA segments may be connected include, without limitation, the use of halogens (F—, Br—, I—)/alkynes addition reactions, carbonyls/sulfhydryls/maleimide, and carboxyl/amine linkages. For example, one RNA molecule may be modified with thiol at 3′ (using disulfide amidite and universal support or disulfide modified support), and the other RNA molecule may be modified with acrydite at 5′ (using acrylic phosphoramidite), then the two RNA molecules can be connected by a Michael addition reaction. This strategy can also be applied to connecting multiple RNA molecules stepwise. Also provided are methods for linking more than two (e.g., three, four, five, six, etc.) RNA molecules to each other. Without wishing to be bound by theory, this may be useful when a desired RNA molecule is longer than about 40 nucleotides, e.g., such that chemical synthesis efficiency degrades, e.g., as noted in US20160102322A1 (incorporated herein by reference in its entirety).

[0292] By way of illustration, a tracrRNA is typically around 80 nucleotides in length. Such RNA molecules may be produced, for example, by processes such as in vitro transcription or chemical synthesis. In some embodiments, when chemical synthesis is used to produce such RNA molecules, they may be produced as a single synthesis product or by linking two or more synthesized RNA segments to each other. In embodiments, when three or more RNA segments are connected to each other, different methods may be used to link the individual segments together. Also, the RNA segments may be connected to each other in one pot (e.g., a container, vessel, well, tube, plate, or other receptacle), all at the same time, or in one pot at different times or in different pots at different times. In a non-limiting example, to assemble RNA Segments 1, 2 and 3 in numerical order, RNA Segments 1 and 2 may first be connected, 5′ to 3′, to each other. The reaction product may then be purified for reaction mixture components (e.g., by chromatography), then placed in a second pot, for connection of the 3′ terminus with the 5′ terminus of RNA Segment 3. The final reaction product may then be connected to the 5′ terminus of RNA Segment 3.

[0293] In another non-limiting example, RNA Segment 1 (about 30 nucleotides) is the target locus recognition sequence of a crRNA and a portion of Hairpin Region 1. RNA Segment 2 (about 35 nucleotides) contains the remainder of Hairpin Region 1 and some of the linear tracrRNA between Hairpin Region 1 and Hairpin Region 2. RNA Segment 3 (about 35 nucleotides) contains the remainder of the linear tracrRNA between Hairpin Region 1 and Hairpin Region 2 and all of Hairpin Region 2. In this example, RNA Segments 2 and 3 are linked, 5′ to 3′, using click chemistry. Further, the 5′ and 3′ end termini of the reaction product are both phosphorylated. The reaction product is then contacted with RNA Segment 1, having a 3′ terminal hydroxyl group, and T4 RNA ligase to produce a guide RNA molecule.

[0294] A number of additional linking chemistries may be used to connect RNA segments according to method of the invention. Some of these chemistries are set out in Table 6 of US20160102322A1, which is incorporated herein by reference in its entirety.

### Vectors

[0295] The disclosure provides, in part, a nucleic acid, e.g., vector, encoding a Gene Writer polypeptide described herein, a template nucleic acid described herein, or both. In some embodiments, a vector comprises a selective marker, e.g., an antibiotic resistance marker. In some embodiments, the antibiotic resistance marker is a kanamycin resistance marker. In some embodiments, the antibiotic resistance marker does not confer resistance to beta-lactam antibiotics. In some embodiments, the vector does not comprise an ampicillin resistance marker. In some embodiments, the vector comprises a kanamycin resistance marker and does not comprise an ampicillin resistance marker. In some embodiments, a vector encoding a Gene Writer polypeptide is integrated into a target cell genome (e.g., upon administration to a target cell, tissue, organ, or subject). In some embodiments, a vector encoding a Gene Writer polypeptide is not integrated into a target cell genome (e.g., upon administration to a target cell, tissue, organ, or subject). In some embodiments, a vector comprising a template nucleic acid (e.g., template DNA) is not integrated into a target cell genome (e.g., upon administration to a target cell, tissue, organ, or subject). In some embodiments, if a vector is integrated into a target site in a target cell genome, the selective marker is not integrated into the genome. In some embodiments, if a vector is integrated into a target site in a target cell genome, genes or sequences involved in vector maintenance (e.g., plasmid maintenance genes) are not integrated into the genome. In some embodiments, if a vector is integrated into a target site in a target cell genome, transfer regulating sequences (e.g., inverted terminal repeats, e.g., from an AAV) are not integrated into the genome. In some embodiments, administration of a vector (e.g., encoding a Gene Writer polypeptide described herein, a template nucleic acid described herein, or both) to a target cell, tissue, organ, or subject results in integration of a portion of the vector into one or more target sites in the genome(s) of said target cell, tissue, organ, or subject. In some embodiments, less than 99, 95, 90, 80, 70, 60, 50, 40, 30, 20, 10, 5, 4, 3, 2, or 1% of target sites (e.g., no target sites) comprising integrated material comprise a selective marker (e.g., an antibiotic resistance gene), a transfer regulating sequence (e.g., an inverted terminal repeat, e.g., from an AAV), or both from the vector.

### AAV Vectors

[0296] In some embodiments, the vector encoding a Gene Writer polypeptide described herein, a template nucleic acid described herein, or both, is an adeno-associated virus (AAV) vector, e.g., comprising an AAV genome. In some embodiments, the AAV genome comprises two genes that encode four replication proteins and three capsid proteins, respectively. In some embodiments, the genes are flanked on either side by 145-bp inverted terminal repeats (ITRs). In some embodiments, the virion comprises up to three capsid proteins (Vp1, Vp2, and/or Vp3), e.g., produced in a 1:1:10 ratio. In some embodiments, the capsid proteins are produced from the same open reading frame and/or from differential splicing (Vp1) and alternative translational start sites (Vp2 and Vp3, respectively). Generally, Vp3 is the most abundant subunit in the virion and participates in receptor recognition at the cell surface defining the tropism of the virus. In some embodiments, Vp1 comprises a phospholipase domain, e.g., which functions in viral infectivity, in the N-terminus of Vp1.

[0297] In some embodiments, packaging capacity of the viral vectors limits the size of the base editor that can be packaged into the vector. For example, the packaging capacity of the AAVs can be about 4.5 kb (e.g., about 3.0, 3.5, 4.0, 4.5, 5.0, 5.5, or 6.0 kb), e.g., including one or two inverted terminal repeats (ITRs), e.g., 145 base ITRs.

[0298] In some embodiments, recombinant AAV (rAAV) comprises cis-acting 145-bp ITRs flanking vector transgene cassettes, e.g., providing up to 4.5 kb for packaging of foreign DNA. Subsequent to infection, rAAV can, in some instances, express a protein described herein and persist without integration into the host genome by existing episomally in circular head-to-tail concatemers. rAAV can be used, for example, in vitro and in vivo. In some embodiments, AAV-mediated gene delivery requires that the length of the coding sequence of the gene is equal or greater in size than the wild-type AAV genome.

[0299] AAV delivery of genes that exceed this size and/or the use of large physiological regulatory elements can be accomplished, for example, by dividing the protein(s) to be delivered into two or more fragments. In some embodiments, the N-terminal fragment is fused to a split intein-N. In some embodiments, the C-terminal fragment is fused to a split intein-C. In embodiments, the fragments are packaged into two or more AAV vectors.

[0300] In some embodiments, dual AAV vectors are generated by splitting a large transgene expression cassette in two separate halves (5 and 3 ends, or head and tail), e.g., wherein each half of the cassette is packaged in a single AAV vector (of <5 kb). The re-assembly of the full-length transgene expression cassette can, in some embodiments, then be achieved upon co-infection of the same cell by both dual AAV vectors. In some embodiments, co-infection is followed by one or more of: (1) homologous recombination (HR) between 5 and 3 genomes (dual AAV overlapping vectors); (2) ITR-mediated tail-to-head concatemerization of 5 and 3 genomes (dual AAV trans-splicing vectors); and/or (3) a combination of these two mechanisms (dual AAV hybrid vectors). In some embodiments, the use of dual AAV vectors in vivo results in the expression of full-length proteins. In some embodiments, the use of the dual AAV vector platform represents an efficient and viable gene transfer strategy for transgenes of greater than about 4.0, 4.1, 4.2, 4.3, 4.4, 4.5, 4.6, 4.7, 4.8, 4.9, or 5.0 kb in size. In some embodiments, AAV vectors can also be used to transduce cells with target nucleic acids, e.g., in the in vitro production of nucleic acids and peptides. In some embodiments, AAV vectors can be used for in vivo and ex vivo gene therapy procedures (see, e.g., West et al., Virology 160:38-47 (1987); U.S. Pat. No. 4,797,368; WO 93/24641; Kotin, Human Gene Therapy 5:793-801 (1994); Muzyczka, J. Clin. Invest. 94:1351 (1994); each of which is incorporated herein by reference in their entirety). The construction of recombinant AAV vectors is described in a number of publications, including U.S. Pat. No. 5,173,414; Tratschin et al., Mol. Cell. Biol. 5:3251-3260 (1985); Tratschin, et al., Mol. Cell. Biol. 4:2072-2081 (1984); Hermonat & Muzyczka, PNAS 81:6466-6470 (1984); and Samulski et al., J. Virol. 63:03822-3828 (1989) (incorporated by reference herein in their entirety).

[0301] In some embodiments, a Gene Writer described herein (e.g., with or without one or more guide nucleic acids) can be delivered using AAV, lentivirus, adenovirus or other plasmid or viral vector types, in particular, using formulations and doses from, for example, U.S. Pat. No. 8,454,972 (formulations, doses for adenovirus), U.S. Pat. No. 8,404,658 (formulations, doses for AAV) and U.S. Pat. No. 5,846,946 (formulations, doses for DNA plasmids) and from clinical trials and publications regarding the clinical trials involving lentivirus, AAV and adenovirus. For example, for AAV, the route of administration, formulation and dose can be as described in U.S. Pat. No. 8,454,972 and as in clinical trials involving AAV. For Adenovirus, the route of administration, formulation and dose can be as described in U.S. Pat. No. 8,404,658 and as in clinical trials involving adenovirus. For plasmid delivery, the route of administration, formulation and dose can be as described in U.S. Pat. No. 5,846,946 and as in clinical studies involving plasmids. Doses can be based on or extrapolated to an average 70 kg individual (e.g. a male adult human), and can be adjusted for patients, subjects, mammals of different weight and species. Frequency of administration is within the ambit of the medical or veterinary practitioner (e.g., physician, veterinarian), depending on usual factors including the age, sex, general health, other conditions of the patient or subject and the particular condition or symptoms being addressed. In some embodiments, the viral vectors can be injected into the tissue of interest. For cell-type specific Gene Writing, the expression of the Gene Writer and optional guide nucleic acid can, in some embodiments, be driven by a cell-type specific promoter.

[0302] In some embodiments, AAV allows for low toxicity, for example, due to the purification method not requiring ultracentrifugation of cell particles that can activate the immune response. In some embodiments, AAV allows low probability of causing insertional mutagenesis, for example, because it does not substantially integrate into the host genome.

[0303] In some embodiments, AAV has a packaging limit of about 4.4, 4.5, 4.6, 4.7, or 4.75 kb. In some embodiments, a Gene Writer, promoter, and transcription terminator can fit into a single viral vector. SpCas9 (4.1 kb) may, in some instances, be difficult to package into AAV. Therefore, in some embodiments, a Gene Writer is used that is shorter in length than other Gene Writers or base editors. In some embodiments, the Gene Writers are less than about 4.5 kb, 4.4 kb, 4.3 kb, 4.2 kb, 4.1 kb, 4 kb, 3.9 kb, 3.8 kb, 3.7 kb, 3.6 kb, 3.5 kb, 3.4 kb, 3.3 kb, 3.2 kb, 3.1 kb, 3 kb, 2.9 kb, 2.8 kb, 2.7 kb, 2.6 kb, 2.5 kb, 2 kb, or 1.5 kb.

[0304] An AAV can be AAV1, AAV2, AAV5 or any combination thereof. In some embodiments, the type of AAV is selected with respect to the cells to be targeted; e.g., AAV serotypes 1, 2, 5 or a hybrid capsid AAV1, AAV2, AAV5 or any combination thereof can be selected for targeting brain or neuronal cells; or AAV4 can be selected for targeting cardiac tissue. In some embodiments, AAV8 is selected for delivery to the liver. Exemplary AAV serotypes as to these cells are described, for example, in Grimm, D. et al, J. Virol. 82: 5887-5911 (2008) (incorporated herein by reference in its entirety). In some embodiments, AAV refers all serotypes, subtypes, and naturally-occurring AAV as well as recombinant AAV. AAV may be used to refer to the virus itself or a derivative thereof. In some embodiments, AAV includes AAV1, AAV2, AAV3, AAV3B, AAV4, AAV5, AAV6, AAV6.2, AAV7, AAVrh.64R1, AAVhu.37, AAVrh.8, AAVrh.32.33, AAV8, AAV9, AAV-DJ, AAV2/8, AAVrh10, AAVLK03, AV10, AAV11, AAV 12, rh10, and hybrids thereof, avian AAV, bovine AAV, canine AAV, equine AAV, primate AAV, nonprimate AAV, and ovine AAV. The genomic sequences of various serotypes of AAV, as well as the sequences of the native terminal repeats (TRs), Rep proteins, and capsid subunits are known in the art. Such sequences may be found in the literature or in public databases such as GenBank. Additional exemplary AAV serotypes are listed in Table 5.

TABLE 5
Viral delivery modalities

| Target Tissue | Vehicle | Reference |
|---|---|---|
| Liver | AAV (AAV8¹, AAVrh.8¹, | 1. Wang et al., Mol. Ther. 18, |
| | AAVhu.37¹, AAV2/8, | 118-25 (2010) |
| | AAV2/rh10², AAV9, AAV2, | 2. Ginn et al., JHEP Reports, |
| | NP40³, NP59^{2,3}, AAV3B⁵, | 100065 (2019) |
| | AAV-DJ⁴, AAV-LK01⁴, | 3. Paulk et al., Mol. Ther. 26, |
| | AAV-LK02⁴, AAV-LK03⁴, | 289-303 (2018). |
| | AAV-LK19⁴ | 4. L. Lisowski et al., Nature. |
| | Adenovirus (Ad5, HC-AdV⁶) | 506, 382-6 (2014). |
| | | 5. L. Wang et al., Mol. Ther. 23, |
| | | 1877-87 (2015). |
| | | 6. Hausl Mol. Ther (2010) |
| Lung | AAV (AAV4, AAV5, AAV6¹, | 1. Duncan et al., Mol Ther |
| | AAV9, H22²) | Methods Clin Dev (2018) |
| | Adenovirus (Ad5, Ad3. Ad21, | 2. Cooney et al., Am J Respir |
| | Ad14)³ | Cell Mol Biol (2019) |
| | | 3. Li et al., Mol Ther Methods |
| | | Clin Dev (2019) |
| Skin | AAV6¹, AAV-LK19² | 1. Petek et al., Mol. Ther. (2010) |
| | | 2. L. Lisowski et al., Nature. |
| | | 506, 382-6 (2014). |
| HSCs | HDAd5/35⁺⁺ | Wang et al. Blood Adv (2019) |

[0305] In some embodiments, a pharmaceutical composition (e.g., comprising an AAV as described herein) has less than 10% empty capsids, less than 8% empty capsids, less than 7% empty capsids, less than 5% empty capsids, less than 3% empty capsids, or less than 1% empty capsids. In some embodiments, the pharmaceutical composition has less than about 5% empty capsids. In some embodiments, the number of empty capsids is below the limit of detection. In some embodiments, it is advantageous for the pharmaceutical composition to have low amounts of empty capsids, e.g., because empty capsids may generate an adverse response (e.g., immune response, inflammatory response, liver response, and/or cardiac response), e.g., with little or no substantial therapeutic benefit.

[0306] In some embodiments, the residual host cell protein (rHCP) in the pharmaceutical composition is less than or equal to 100 ng/ml rHCP per 1×10¹³ vg/ml, e.g., less than or equal to 40 ng/ml rHCP per 1×10¹³ vg/ml or 1-50 ng/ml rHCP per 1×10¹³ vg/ml. In some embodiments, the pharmaceutical composition comprises less than 10 ng rHCP per 1.0×10¹³ vg, or less than 5 ng rHCP per 1.0×10¹³ vg, less than 4 ng rHCP per 1.0×10¹³ vg, or less than 3 ng rHCP per 1.0×10¹³ vg, or any concentration in between. In some embodiments, the residual host cell DNA (hcDNA) in the pharmaceutical composition is less than or equal to 5×10⁶ pg/ml hcDNA per 1×10¹³ vg/ml, less than or equal to 1.2×10⁶ pg/ml hcDNA per 1×10¹³ vg/ml, or 1×10⁵ pg/ml hcDNA per 1×10¹³ vg/ml. In some embodiments, the residual host cell DNA in said pharmaceutical composition is less than 5.0×10⁵ pg per 1×10¹³ vg, less than 2.0×10⁵ pg per 1.0×10¹³ vg, less than 1.1×10⁵ pg per 1.0×10¹³ vg, less than 1.0×10⁵ pg hcDNA per 1.0×10¹³ vg, less than 0.9×10⁵ pg hcDNA per 1.0×10¹³ vg, less than 0.8×10⁵ pg hcDNA per 1.0×10¹³ vg, or any concentration in between.

[0307] In some embodiments, the residual plasmid DNA in the pharmaceutical composition is less than or equal to 1.7×10⁵ pg/ml per 1.0×10¹³ vg/ml, or 1×10⁵ pg/ml per 1×1.0×10¹³ vg/ml, or 1.7×10⁶ pg/ml per 1.0×10¹³ vg/ml. In some embodiments, the residual DNA plasmid in the pharmaceutical composition is less than 10.0×10⁵ pg by 1.0×10¹³ vg, less than 8.0×10⁵ pg by 1.0×10¹³ vg or less than 6.8×10⁵ pg by 1.0×10¹³ vg. In embodiments, the pharmaceutical composition comprises less than 0.5 ng per 1.0×10¹³ vg, less than 0.3 ng per 1.0×10¹³ vg, less than 0.22 ng per 1.0×10¹³ vg or less than 0.2 ng per 1.0×10¹³ vg or any intermediate concentration of bovine serum albumin (BSA). In embodiments, the benzonase in the pharmaceutical composition is less than 0.2 ng by 1.0×10¹³ vg, less than 0.1 ng by 1.0×10¹³ vg, less than 0.09 ng by 1.0×10¹³ vg, less than 0.08 ng by 1.0×10¹³ vg or any intermediate concentration. In embodiments, Poloxamer 188 in the pharmaceutical composition is about 10 to 150 ppm, about 15 to 100 ppm or about 20 to 80 ppm. In embodiments, the cesium in the pharmaceutical composition is less than 50 pg/g (ppm), less than 30 pg/g (ppm) or less than 20 pg/g (ppm) or any intermediate concentration.

[0308] In embodiments, the pharmaceutical composition comprises total impurities, e.g., as determined by SDS-PAGE, of less than 10%, less than 8%, less than 7%, less than 6%, less than 5%, less than 4%, less than 3%, less than 2%, or any percentage in between. In embodiments, the total purity, e.g., as determined by SDS-PAGE, is greater than 90%, greater than 92%, greater than 93%, greater than 94%, greater than 95%, greater than 96%, greater than 97%, greater than 98%, or any percentage in between. In embodiments, no single unnamed related impurity, e.g., as measured by SDS-PAGE, is greater than 5%, greater than 4%, greater than 3% or greater than 2%, or any percentage in between. In embodiments, the pharmaceutical composition comprises a percentage of filled capsids relative to total capsids (e.g., peak 1+peak 2 as measured by analytical ultracentrifugation) of greater than 85%, greater than 86%, greater than 87%, greater than 88%, greater than 89%, greater than 90%, greater than 91%, greater than 91.9%, greater than 92%, greater than 93%, or any percentage in between. In embodiments of the pharmaceutical composition, the percentage of filled capsids measured in peak 1 by analytical ultracentrifugation is 20-80%, 25-75%, 30-75%, 35-75%, or 37.4-70.3%. In embodiments of the pharmaceutical composition, the percentage of filled capsids measured in peak 2 by analytical ultracentrifugation is 20-80%, 20-70%, 22-65%, 24-62%, or 24.9-60.1%.

[0309] In one embodiment, the pharmaceutical composition comprises a genomic titer of 1.0 to 5.0×10¹³ vg/mL, 1.2 to 3.0×10¹³ vg/mL or 1.7 to 2.3×10¹³ vg/ml. In one embodiment, the pharmaceutical composition exhibits a biological load of less than 5 CFU/mL, less than 4 CFU/mL, less than 3 CFU/mL, less than 2 CFU/mL or less than 1 CFU/mL or any intermediate contraction. In embodiments, the amount of endotoxin according to USP, for example, USP <85> (incorporated by reference in its entirety) is less than 1.0 EU/mL, less than 0.8 EU/mL or less than 0.75 EU/mL. In embodiments, the osmolarity of a pharmaceutical composition according to USP, for example, USP <785> (incorporated by reference in its entirety) is 350 to 450 mOsm/kg, 370 to 440 mOsm/kg or 390 to 430 mOsm/kg. In embodiments, the pharmaceutical composition contains less than 1200 particles that are greater than 25 μm per container, less than 1000 particles that are greater than 25 μm per container, less than 500 particles that are greater than 25 μm per container or any intermediate value. In embodiments, the pharmaceutical composition contains less than 10,000 particles that are greater than 10 μm per container, less than 8000 particles that are greater than 10 μm per container or less than 600 particles that are greater than 10 pm per container.

[0310] In one embodiment, the pharmaceutical composition has a genomic titer of 0.5 to 5.0×10¹³ vg/mL, 1.0 to 4.0×10¹³ vg/mL, 1.5 to 3.0×10¹³ vg/ml or 1.7 to 2.3×10¹³ vg/ml. In one embodiment, the pharmaceutical composition described herein comprises one or more of the following: less than about 0.09 ng benzonase per 1.0×10¹³ vg, less than about 30 pg/g (ppm) of cesium, about 20 to 80 ppm Poloxamer 188, less than about 0.22 ng BSA per 1.0×10¹³ vg, less than about 6.8×10⁵ pg of residual DNA plasmid per 1.0×10¹³ vg, less than about 1.1×10⁵ pg of residual hcDNA per 1.0×10¹³ vg, less than about 4 ng of rHCP per 1.0×10¹³ vg, pH 7.7 to 8.3, about 390 to 430 mOsm/kg, less than about 600 particles that are >25 μm in size per container, less than about 6000 particles that are >10 μm in size per container, about 1.7×10 13-2.3×10¹³ vg/mL genomic titer, infectious titer of about 3.9×10⁸ to 8.4×10¹⁰ IU per 1.0×10¹³ vg, total protein of about 100-300 μg per 1.0×10¹³ vg, mean survival of >24 days in A7SMA mice with about 7.5×10¹³ vg/kg dose of viral vector, about 70 to 130% relative potency based on an in vitro cell based assay and/or less than about 5% empty capsid. In various embodiments, the pharmaceutical compositions described herein comprise any of the viral particles discussed here, retain a potency of between ±20%, between ±15%, between ±10% or within ±5% of a reference standard. In some embodiments, potency is measured using a suitable in vitro cell assay or in vivo animal model.

[0311] Additional methods of preparation, characterization, and dosing AAV particles are taught in WO2019094253, which is incorporated herein by reference in its entirety.

[0312] Additional rAAV constructs that can be employed consonant with the invention include those described in Wang et al 2019, available at: //doi.org/10.1038/s41573-019-0012-9, including Table 1 thereof, which is incorporated by reference in its entirety.

### Kits, Articles of Manufacture, and Pharmaceutical Compositions

[0313] In an aspect the disclosure provides a kit comprising a Gene Writer or a Gene Writing system, e.g., as described herein. In some embodiments, the kit comprises a Gene Writer polypeptide (or a nucleic acid encoding the polypeptide) and a template DNA. In some embodiments, the kit further comprises a reagent for introducing the system into a cell, e.g., transfection reagent, LNP, and the like. In some embodiments, the kit is suitable for any of the methods described herein. In some embodiments, the kit comprises one or more elements, compositions (e.g., pharmaceutical compositions), Gene Writers, and/or Gene Writer systems, or a functional fragment or component thereof, e.g., disposed in an article of manufacture. In some embodiments, the kit comprises instructions for use thereof.

[0314] In an aspect, the disclosure provides an article of manufacture, e.g., in which a kit as described herein, or a component thereof, is disposed.

[0315] In an aspect, the disclosure provides a pharmaceutical composition comprising a Gene Writer or a Gene Writing system, e.g., as described herein. In some embodiments, the pharmaceutical composition further comprises a pharmaceutically acceptable carrier or excipient. In some embodiments, the pharmaceutical composition comprises a template DNA.

### Chemistry, Manufacturing, and Controls (CMC)

[0316] Purification of protein therapeutics is described, for example, in Franks, Protein Biotechnology: Isolation, Characterization, and Stabilization, Humana Press (2013); and in Cutler, Protein Purification Protocols (Methods in Molecular Biology), Humana Press (2010).

[0317] In some embodiments, a Gene Writer™ system, polypeptide, and/or template nucleic acid (e.g., template DNA) conforms to certain quality standards. In some embodiments, a Gene Writer™ system, polypeptide, and/or template nucleic acid (e.g., template DNA) produced by a method described herein conforms to certain quality standards. Accordingly, the disclosure is directed, in some aspects, to methods of manufacturing a Gene Writer™ system, polypeptide, and/or template nucleic acid that conforms to certain quality standards, e.g., in which said quality standards are assayed. The disclosure is also directed, in some aspects, to methods of assaying said quality standards in a Gene Writer™ system, polypeptide, and/or template nucleic acid. In some embodiments, quality standards include, but are not limited to, one or more (e.g., 1, 2, 3, 4, 5, 6, 7, 8, 9, 10, 11, or 12) of the following:

[0318] (i) the length of the template DNA or the mRNA encoding the GeneWriter polypeptide, e.g., whether the DNA or mRNA has a length that is above a reference length or within a reference length range, e.g., whether at least 80, 85, 90, 95, 96, 97, 98, or 99% of the DNA or mRNA present is greater than 100, 125, 150, 175, or 200 nucleotides long;

[0319] (ii) the presence, absence, and/or length of a polyA tail on the mRNA, e.g., whether at least 80, 85, 90, 95, 96, 97, 98, or 99% of the mRNA present contains a polyA tail (e.g., a polyA tail that is at least 5, 10 (SEQ ID NO: 3540), 20 (SEQ ID NO: 3541), 30 (SEQ ID NO: 3542), 50 (SEQ ID NO: 3543), 70 (SEQ ID NO: 3544), 100 (SEQ ID NO: 3545) nucleotides in length);

[0320] (iii) the presence, absence, and/or type of a 5′ cap on the mRNA, e.g., whether at least 80, 85, 90, 95, 96, 97, 98, or 99% of the mRNA present contains a 5′ cap, e.g., whether that cap is a 7-methylguanosine cap, e.g., a O-Me-m7G cap;

[0321] (iv) the presence, absence, and/or type of one or more modified nucleotides (e.g., selected from pseudouridine, dihydrouridine, inosine, 7-methylguanosine, 1-N-methylpseudouridine (1-Me-Ψ), 5-methoxyuridine (5-MO-U), 5-methylcytidine (5mC), or a locked nucleotide) in the mRNA, e.g., whether at least 80, 85, 90, 95, 96, 97, 98, or 99% of the mRNA present contains one or more modified nucleotides;

[0322] (v) the stability of the template DNA or the mRNA (e.g., over time and/or under a pre-selected condition), e.g., whether at least 80, 85, 90, 95, 96, 97, 98, or 99% of the DNA or mRNA remains intact (e.g., greater than 100, 125, 150, 175, or 200 nucleotides long) after a stability test;

[0323] (vi) the potency of the template DNA or the mRNA in a system for modifying DNA, e.g., whether at least 1% of target sites are modified after a system comprising the DNA or mRNA is assayed for potency;

[0324] (vii) the length of the polypeptide, first polypeptide, or second polypeptide, e.g., whether the polypeptide, first polypeptide, or second polypeptide has a length that is above a reference length or within a reference length range, e.g., whether at least 80, 85, 90, 95, 96, 97, 98, or 99% of the polypeptide, first polypeptide, or second polypeptide present is greater than 600, 650, 700, 750, 800, 850, 900, 950, 1000, 1050, 1100, 1150, 1200, 1250, 1300, 1350, 1400, 1450, 1500, 1600, 1700, 1800, 1900, or 2000 amino acids long (and optionally, no larger than 2500, 2000, 1500, 1400, 1300, 1200, 1100, 1000, 900, 800, 700, or 600 amino acids long);

[0325] (viii) the presence, absence, and/or type of post-translational modification on the polypeptide, first polypeptide, or second polypeptide, e.g., whether at least 80, 85, 90, 95, 96, 97, 98, or 99% of the polypeptide, first polypeptide, or second polypeptide contains phosphorylation, methylation, acetylation, myristoylation, palmitoylation, isoprenylation, glipyatyon, or lipoylation, or any combination thereof;

[0326] (ix) the presence, absence, and/or type of one or more artificial, synthetic, or non-canonical amino acids (e.g., selected from ornithine, β-alanine, GABA, δ-Aminolevulinic acid, PABA, a D-amino acid (e.g., D-alanine or D-glutamate), aminoisobutyric acid, dehydroalanine, cystathionine, lanthionine, Djenkolic acid, Diaminopimelic acid, Homoalanine, Norvaline, Norleucine, Homonorleucine, homoserine, O-methyl-homoserine and O-ethyl-homoserine, ethionine, selenocysteine, selenohomocysteine, selenomethionine, selenoethionine, tellurocysteine, or telluromethionine) in the polypeptide, first polypeptide, or second polypeptide, e.g., whether at least 80, 85, 90, 95, 96, 97, 98, or 99% of the polypeptide, first polypeptide, or second polypeptide present contains one or more artificial, synthetic, or non-canonical amino acids;

[0327] (x) the stability of the polypeptide, first polypeptide, or second polypeptide (e.g., over time and/or under a pre-selected condition), e.g., whether at least 80, 85, 90, 95, 96, 97, 98, or 99% of the polypeptide, first polypeptide, or second polypeptide remains intact (e.g., greater than 600, 650, 700, 750, 800, 850, 900, 950, 1000, 1050, 1100, 1150, 1200, 1250, 1300, 1350, 1400, 1450, 1500, 1600, 1700, 1800, 1900, or 2000 amino acids long (and optionally, no larger than 2500, 2000, 1500, 1400, 1300, 1200, 1100, 1000, 900, 800, 700, or 600 amino acids long)) after a stability test;

[0328] (xi) the potency of the polypeptide, first polypeptide, or second polypeptide in a system for modifying DNA, e.g., whether at least 1% of target sites are modified after a system comprising the polypeptide, first polypeptide, or second polypeptide is assayed for potency; or

[0329] (xii) the presence, absence, and/or level of one or more of a pyrogen, virus, fungus, bacterial pathogen, or host cell protein, e.g., whether the system is free or substantially free of pyrogen, virus, fungus, bacterial pathogen, or host cell protein contamination.

[0330] In some embodiments, a system or pharmaceutical composition described herein is endotoxin free.

[0331] In some embodiments, the presence, absence, and/or level of one or more of a pyrogen, virus, fungus, bacterial pathogen, and/or host cell protein is determined. In embodiments, whether the system is free or substantially free of pyrogen, virus, fungus, bacterial pathogen, and/or host cell protein contamination is determined.

[0332] In some embodiments, a pharmaceutical composition or system as described herein has one or more (e.g., 1, 2, 3, or 4) of the following characteristics:

[0333] (a) less than 1% (e.g., less than 0.5%, 0.4%, 0.3%, 0.2%, or 0.1%) DNA template relative to the RNA encoding the polypeptide, e.g., on a molar basis;

[0334] (b) less than 1% (e.g., less than 0.5%, 0.4%, 0.3%, 0.2%, or 0.1%) uncapped RNA relative to the RNA encoding the polypeptide, e.g., on a molar basis;

[0335] (c) less than 1% (e.g., less than 0.5%, 0.4%, 0.3%, 0.2%, or 0.1%) partial length RNAs relative to the RNA encoding the polypeptide, e.g., on a molar basis;

[0336] (d) substantially lacks unreacted cap dinucleotides.

### Exemplary Heterologous Object Sequences

[0337] In some embodiments, the systems or methods provided herein comprise a heterologous object sequence, wherein the heterologous object sequence or a reverse complementary sequence thereof, encodes a protein (e.g., an antibody) or peptide. In some embodiments, the therapy is one approved by a regulatory agency such as FDA.

[0338] In some embodiments, the protein or peptide is a protein or peptide from the THPdb database (Usmani et al. PLoS One 12(7):e0181748 (2017), herein incorporated by reference in its entirety. In some embodiments, the protein or peptide is a protein or peptide disclosed in Table 5B. In some embodiments, the systems or methods disclosed herein, for example, those comprising Gene Writers, may be used to integrate an expression cassette for a protein or peptide from Table 5B into a host cell to enable the expression of the protein or peptide in the host. In some embodiments, the sequences of the protein or peptide in the first column of Table 5B can be found in the patents or applications provided in the third column of Table 5B, incorporated by reference in their entireties.

[0339] In some embodiments, the protein or peptide is an antibody disclosed in Table 1 of Lu et al. J Biomed Sci 27(1):1 (2020), herein incorporated by reference in its entirety. In some embodiments, the protein or peptide is an antibody disclosed in Table 29. In some embodiments, the systems or methods disclosed herein, for example, those comprising Gene Writers, may be used to integrate an expression cassette for an antibody from Table 29 into a host cell to enable the expression of the antibody in the host. In some embodiments, a system or method described herein is used to express an agent that binds a target of column 2 of Table 29 (e.g., a monoclonal antibody of column 1 of Table 29) in a subject having an indication of column 3 of Table 29.

TABLE 5B
Exemplary protein and peptide therapeutics.

| Therapeutic peptide | Category | Patent Number |
|---|---|---|
| Lepirudin | Antithrombins and Fibrinolytic | CA1339104 |
| | Agents | |
| Cetuximab | Antineoplastic Agents | CA1340417 |
| Dor se alpha | Enzymes | CA2184581 |
| Denileukin diftitox | Antineoplastic Agents | |
| Etanercept | Immunosuppressive Agents | CA2476934 |
| Bivalirudin | Antithrombins | U.S. Pat. No. 7,582,727 |
| Leuprolide | Antineoplastic Agents | |
| Peginterferon alpha-2a | Immunosuppressive Agents | CA2203480 |
| Alteplase | Thrombolytic Agents | |
| Interferon alpha-n1 | Antiviral Agents | |
| Darbepoetin alpha | Anti-anemic Agents | CA2165694 |
| Reteplase | Fibrinolytic Agents | CA2107476 |
| Epoetin alpha | Hematinics | CA1339047 |
| Salmon Calcitonin | Bone Density Conservation | U.S. Pat. No. 6,440,392 |
| | Agents | |
| Interferon alpha-n3 | Immunosuppressive Agents | |
| Pegfilgrastim | Immunosuppressive Agents | CA1341537 |
| Sargramostim | Immunosuppressive Agents | CA1341150 |
| Secretin | Diagnostic Agents | |
| Peginterferon alpha-2b | Immunosuppressive Agents | CA1341567 |
| Asparagi se | Antineoplastic Agents | |
| Thyrotropin alpha | Diagnostic Agents | U.S. Pat. No. 5,840,566 |
| Antihemophilic Factor | Coagulants and Thrombotic agents | CA2124690 |
| A kinra | Antirheumatic Agents | CA2141953 |
| Gramicidin D | Anti-Bacterial Agents | |
| Intravenous | Immunologic Factors | |
| Immunoglobulin | | |
| Anistreplase | Fibrinolytic Agents | |
| Insulin Regular | Antidiabetic Agents | |
| Tenecteplase | Fibrinolytic Agents | CA2129660 |
| Menotropins | Fertility Agents | |
| Interferon gamma-1b | Immunosuppressive Agents | U.S. Pat. No. 6,936,695 |
| Interferon alpha-2a, | | CA2172664 |
| Recombi nt | | |
| Coagulation factor VIIa | Coagulants | |
| Oprelvekin | Antineoplastic Agents | |
| Palifermin | Anti-Mucositis Agents | |
| Glucagon recombi nt | Hypoglycemic Agents | |
| Aldesleukin | Antineoplastic Agents | |
| Botulinum Toxin Type B | Antidystonic Agents | |
| Omalizumab | Anti-Allergic Agents | CA2113813 |
| Lutropin alpha | Fertility Agents | U.S. Pat. No. 5,767,251 |
| Insulin Lispro | Hypoglycemic Agents | U.S. Pat. No. 5,474,978 |
| Insulin Glargine | Hypoglycemic Agents | U.S. Pat. No. 7,476,652 |
| Collage se | | |
| Rasburicase | Gout Suppressants | CA2175971 |
| Adalimumab | Antirheumatic Agents | CA2243459 |
| Imiglucerase | Enzyme Replacement Agents | U.S. Pat. No. 5,549,892 |
| Abciximab | Anticoagulants | CA1341357 |
| Alpha-1-protei se inhibitor | Serine Protei se Inhibitors | |
| Pegaspargase | Antineoplastic Agents | |
| Interferon beta-1a | Antineoplastic Agents | CA1341604 |
| Pegademase bovine | Enzyme Replacement Agents | |
| Human Serum Albumin | Serum substitutes | U.S. Pat. No. 6,723,303 |
| Eptifibatide | Platelet Aggregation Inhibitors | U.S. Pat. No. 6,706,681 |
| Serum albumin iodo ted | Diagnostic Agents | |
| Infliximab | Antirheumatic Agents, Anti- | CA2106299 |
| | Inflammatory Agents, Non- | |
| | Steroidal, Dermatologic Agents, | |
| | Gastrointesti 1 Agents and | |
| | Immunosuppressive Agents | |
| Follitropin beta | Fertility Agents | U.S. Pat. No. 7,741,268 |
| Vasopressin | Antidiuretic Agents | |
| Interferon beta-1b | Adjuvants, Immunologic and | CA1340861 |
| | Immunosuppressive Agents | |
| Interferon alphacon-1 | Antiviral Agents and | CA1341567 |
| | Immunosuppressive Agents | |
| Hyaluronidase | Adjuvants, Anesthesia and | |
| | Permeabilizing Agents | |
| Insulin, porcine | Hypoglycemic Agents | |
| Trastuzumab | Antineoplastic Agents | CA2103059 |
| Rituximab | Antineoplastic Agents, | CA2149329 |
| | Immunologic Factors and | |
| | Antirheumatic Agents | |
| Basiliximab | Immunosuppressive Agents | CA2038279 |
| Muromo b | Immunologic Factors and | |
| | Immunosuppressive Agents | |
| Digoxin Immune Fab | Antidotes | |
| (Ovine) | | |
| Ibritumomab | | CA2149329 |
| Daptomycin | | U.S. Pat. No. 6,468,967 |
| Tositumomab | | |
| Pegvisomant | Hormone Replacement Agents | U.S. Pat. No. 5,849,535 |
| Botulinum Toxin Type A | Neuromuscular Blocking Agents, | CA2280565 |
| | Anti-Wrinkle Agents and | |
| | Antidystonic Agents | |
| Pancrelipase | Gastrointesti l Agents and Enzyme | |
| | Replacement Agents | |
| Streptoki se | Fibrinolytic Agents and | |
| | Thrombolytic Agents | |
| Alemtuzumab | | CA1339198 |
| Alglucerase | Enzyme Replacement Agents | |
| Capromab | Indicators, Reagents and | |
| | Diagnostic Agents | |
| Laronidase | Enzyme Replacement Agents | |
| Urofollitropin | Fertility Agents | U.S. Pat. No. 5,767,067 |
| Efalizumab | Immunosuppressive Agents | |
| Serum albumin | Serum substitutes | U.S. Pat. No. 6,723,303 |
| Choriogo dotropin alpha | Fertility Agents and Go dotropins | U.S. Pat. No. 6,706,681 |
| Antithymocyte globulin | Immunologic Factors and | |
| | Immunosuppressive Agents | |
| Filgrastim | Immunosuppressive Agents, | CA1341537 |
| | Antineutropenic Agents and | |
| | Hematopoietic Agents | |
| Coagulation factor ix | Coagulants and Thrombotic | |
| | Agents | |
| Becaplermin | Angiogenesis Inducing Agents | CA1340846 |
| Agalsidase beta | Enzyme Replacement Agents | CA2265464 |
| Interferon alpha-2b | Immunosuppressive Agents | CA1341567 |
| Oxytocin | Oxytocics, Anti-tocolytic Agents | |
| | and Labor Induction Agents | |
| Enfuvirtide | HIV Fusion Inhibitors | U.S. Pat. No. 6,475,491 |
| Palivizumab | Antiviral Agents | CA2197684 |
| Daclizumab | Immunosuppressive Agents | |
| Bevacizumab | Angiogenesis Inhibitors | CA2286330 |
| Arcitumomab | Diagnostic Agents | U.S. Pat. No. 8,420,081 |
| Arcitumomab | Diagnostic Agents | U.S. Pat. No. 7,790,142 |
| Eculizumab | | CA2189015 |
| Panitumumab | | |
| Ranibizumab | Ophthalmics | CA2286330 |
| Idursulfase | Enzyme Replacement Agents | |
| Alglucosidase alpha | Enzyme Replacement Agents | CA2416492 |
| Exe tide | Hypoglycemic Agents | U.S. Pat. No. 6,872,700 |
| Mecasermin | | U.S. Pat. No. 5,681,814 |
| Pramlintide | | U.S. Pat. No. 5,686,411 |
| Galsulfase | Enzyme Replacement Agents | |
| Abatacept | Antirheumatic Agents and | CA2110518 |
| | Immunosuppressive Agents | |
| Cosyntropin | Hormones and Diagnostic Agents | |
| Corticotropin | | |
| Insulin aspart | Hypoglycemic Agents and | U.S. Pat. No. 5,866,538 |
| | Antidiabetic Agents | |
| Insulin detemir | Antidiabetic Agents | U.S. Pat. No. 5,750,497 |
| Insulin glulisine | Antidiabetic Agents | U.S. Pat. No. 6,960,561 |
| Pegaptanib | Intended for the prevention of | |
| | respiratory distress syndrome | |
| | (RDS) in premature infants at high | |
| | risk for RDS. | |
| Nesiritide | | |
| Thymalphasin | | |
| Defibrotide | Antithrombins | |
| tural alpha interferon OR | | |
| multiferon | | |
| Glatiramer acetate | | |
| Preotact | | |
| Teicoplanin | Anti-Bacterial Agents | |
| Ca kinumab | Anti-Inflammatory Agents and | |
| | Monoclo l antibodies | |
| Ipilimumab | Antineoplastic Agents and | CA2381770 |
| | Monoclo l antibodies | |
| Sulodexide | Antithrombins and Fibrinolytic | |
| | Agents and Hypoglycemic Agents | |
| | and Anticoagulants and | |
| | Hypolipidemic Agents | |
| Tocilizumab | | CA2201781 |
| Teriparatide | Bone Density Conservation | U.S. Pat. No. 6,977,077 |
| | Agents | |
| Pertuzumab | Monoclo l antibodies | CA2376596 |
| Rilo cept | Immunosuppressive Agents | U.S. Pat. No. 5,844,099 |
| Denosumab | Bone Density Conservation | CA2257247 |
| | Agents and Monoclo l antibodies | |
| Liraglutide | | U.S. Pat. No. 6,268,343 |
| Golimumab | Antipsoriatic Agents and Monoclo l | |
| | antibodies and TNF inhibitor | |
| Belatacept | Antirheumatic Agents and | |
| | Immunosuppressive Agents | |
| Buserelin | | |
| Velaglucerase alpha | Enzymes | U.S. Pat. No. 7,138,262 |
| Tesamorelin | | U.S. Pat. No. 5,861,379 |
| Brentuximab vedotin | | |
| Taliglucerase alpha | Enzymes | |
| Belimumab | Monoclo 1 antibodies | |
| Aflibercept | Antineoplastic Agents and | U.S. Pat. No. 7,306,799 |
| | Ophthalmics | |
| Asparagi se erwinia | Enzymes | |
| chrysanthemi | | |
| Ocriplasmin | Ophthalmics | |
| Glucarpidase | Enzymes | |
| Teduglutide | | U.S. Pat. No. 5,789,379 |
| Raxibacumab | Anti-Infective Agents and | |
| | Monoclo 1 antibodies | |
| Certolizumab pegol | TNF inhibitor | CA2380298 |
| Insulin, isophane | Hypoglycemic Agents and | |
| | Antidiabetic Agents | |
| Epoetin zeta | | |
| Obinutuzumab | Antineoplastic Agents | |
| Fibrinolysin aka plasmin | | U.S. Pat. No. 3,234,106 |
| Follitropin alpha | | |
| Romiplostim | Colony-Stimulating Factors and | |
| | Thrombopoietic Agents | |
| Luci ctant | Pulmo ry surfactants | U.S. Pat. No. 5,407,914 |
| talizumab | Immunosuppressive agents | |
| Aliskiren | Renin inhibitor | |
| Ragweed Pollen Extract | | |
| Secukinumab | Inhibitor | US20130202610 |
| Somatotropin Recombi nt | Hormone Replacement Agents | CA1326439 |
| Drotrecogin alpha | Antisepsis | CA2036894 |
| Alefacept | Dermatologic and | |
| | Immunosupressive agents | |
| OspA lipoprotein | Vaccines | |
| Uroki se | | U.S. Pat. No. 4,258,030 |
| Abarelix | Anti-Testosterone Agents | U.S. Pat. No. 5,968,895 |
| Sermorelin | Hormone Replacement Agents | |
| Aprotinin | | U.S. Pat. No. 5,198,534 |
| Gemtuzumab ozogamicin | Antineoplastic agents and | U.S. Pat. No. 5,585,089 |
| | Immunotoxins | |
| Satumomab Pendetide | Diagnostic Agents | |
| Albiglutide | Drugs used in diabetes; alimentary | |
| | tract and metabolism; blood | |
| | glucose lowering drugs, excl. | |
| | insulins. | |
| Alirocumab | | |
| Ancestim | | |
| Antithrombin alpha | | |
| Antithrombin III human | | |
| Asfotase alpha | Enzymes Alimentary Tract and | |
| | Metabolism | |
| Atezolizumab | | |
| Autologous cultured | | |
| chondrocytes | | |
| Beractant | | |
| Bli tumomab | Antineoplastic Agents | US20120328618 |
| | Immunosuppressive Agents | |
| | Monoclo l antibodies | |
| | Antineoplastic and | |
| | Immunomodulating Agents | |
| C1 Esterase Inhibitor | | |
| (Human) | | |
| Coagulation Factor XIII A- | | |
| Subunit (Recombi nt) | | |
| Conestat alpha | | |
| Daratumumab | Antineoplastic Agents | |
| Desirudin | | |
| Dulaglutide | Hypoglycemic Agents; Drugs | |
| | Used in Diabetes; Alimentary | |
| | Tract and Metabolism; Blood | |
| | Glucose Lowering Drugs, Excl. | |
| | Insulins | |
| Elosulfase alpha | Enzymes; Alimentary Tract and | |
| | Metabolism | |
| Elotuzumab | | US2014055370 |
| Evolocumab | Lipid Modifying Agents, Plain; | |
| | Cardiovascular System | |
| Fibrinogen Concentrate | | |
| (Human) | | |
| Filgrastim-sndz | | |
| Gastric intrinsic factor | | |
| Hepatitis B immune | | |
| globulin | | |
| Human calcitonin | | |
| Human Clostridium tetani | | |
| toxoid immune globulin | | |
| Human rabies virus | | |
| immune globulin | | |
| Human Rho(D) immune | | |
| globulin | | |
| Hyaluronidase (Human | | U.S. Pat. No. 7,767,429 |
| Recombi nt) | | |
| Idarucizumab | Anticoagulant | |
| Immune Globulin Human | Immunologic Factors; | |
| | Immunosuppressive Agents; Anti- | |
| | Infective Agents | |
| Vedolizumab | Immunosupressive agent, | US2012151248 |
| | Antineoplastic agent | |
| Ustekinumab | Deramtologic agent, | |
| | Immunosuppressive agent, | |
| | antineoplastic agent | |
| Turoctocog alpha | | |
| Tuberculin Purified Protein | | |
| Derivative | | |
| Simoctocog alpha | Antihaemorrhagics: blood | |
| | coagulation factor VIII | |
| Siltuximab | Antineoplastic and | U.S. Pat. No. 7,612,182 |
| | Immunomodulating Agents, | |
| | Immunosuppressive Agents | |
| Sebelipase alpha | Enzymes | |
| Sacrosidase | Enzymes | |
| Ramucirumab | Antineoplastic and | US2013067098 |
| | Immunomodulating Agents | |
| Prothrombin complex | | |
| concentrate | | |
| Poractant alpha | Pulmo ry Surfactants | |
| Pembrolizumab | Antineoplastic and | US2012135408 |
| | Immunomodulating Agents | |
| Peginterferon beta-1a | | |
| Ofatumumab | Antineoplastic and | U.S. Pat. No. 8,337,847 |
| | Immunomodulating Agents | |
| Obiltoxaximab | | |
| Nivolumab | Antineoplastic and | US2013173223 |
| | Immunomodulating Agents | |
| Necitumumab | | |
| Metreleptin | | US20070099836 |
| Methoxy polyethylene | | |
| glycol-epoetin beta | | |
| Mepolizumab | Antineoplastic and | US2008134721 |
| | Immunomodulating Agents, | |
| | Immunosuppressive Agents, | |
| | Interleukin Inhibitors | |
| Ixekizumab | | |
| Insulin Pork | Hypoglycemic Agents, | |
| | Antidiabetic Agents | |
| Insulin Degludec | | |
| Insulin Beef | | |
| Thyroglobulin | Hormone therapy | U.S. Pat. No. 5,099,001 |
| Anthrax immune globulin | Plasma derivative | |
| human | | |
| Anti-inhibitor coagulant | Blood Coagulation Factors, | |
| complex | Antihemophilic Agent | |
| Anti-thymocyte Globulin | Antibody | |
| (Equine) | | |
| Anti-thymocyte Globulin | Antibody | |
| (Rabbit) | | |
| Brodalumab | Antineoplastic and | |
| | Immunomodulating Agents | |
| C1 Esterase Inhibitor | Blood and Blood Forming Organs | |
| (Recombi nt) | | |
| Ca kinumab | Antineoplastic and | |
| | Immunomodulating Agents | |
| Chorionic Go dotropin | Hormones | U.S. Pat. No. 6,706,681 |
| (Human) | | |
| Chorionic Go dotropin | Hormones | U.S. Pat. No. 5,767,251 |
| (Recombi nt) | | |
| Coagulation factor X | Blood Coagulation Factors | |
| human | | |
| Dinutuximab | Antibody, Immunosuppresive | US20140170155 |
| | agent, Antineoplastic agent | |
| Efmoroctocog alpha | Antihemophilic Factor | |
| Factor IX Complex | Antihemophilic agent | |
| (Human) | | |
| Hepatitis A Vaccine | Vaccine | |
| Human Varicella-Zoster | Antibody | |
| Immune Globulin | | |
| Ibritumomab tiuxetan | Antibody, Immunosuppressive | CA2149329 |
| | Agents | |
| Lenograstim | Antineoplastic and | |
| | Immunomodulating Agents | |
| Pegloticase | Enzymes | |
| Protamine sulfate | Heparin Antagonists, Hematologic | |
| | Agents | |
| Protein S human | Anticoagulant plasma protein | |
| Sipuleucel-T | Antineoplastic and | U.S. Pat. No. 8,153,120 |
| | Immunomodulating Agents | |
| Somatropin recombi nt | Hormones, Hormone Substitutes, | CA1326439, CA2252535, |
| | and Hormone Antagonists | U.S. Pat. No. 5,288,703, |
| | | U.S. Pat. No. 5,849,700, |
| | | U.S. Pat. No. 5,849,704, |
| | | U.S. Pat. No. 5,898,030, |
| | | U.S. Pat. No. 6,004,297, |
| | | U.S. Pat. No. 6,152,897, |
| | | U.S. Pat. No. 6,235,004, |
| | | U.S. Pat. No. 6,899,699 |
| Susoctocog alpha | Blood coagulation factors, | |
| | Antihaemorrhagics | |
| Thrombomodulin alpha | Anticoagulant agent, Antiplatelet | |
| | agent | |

TABLE 29
Exemplary monoclonal antibody therapies.

| mAb | Target | Indication |
|---|---|---|
| Muromonab-CD3 | CD3 | Kidney transplant rejection |
| Abciximab | GPIIb/IIIa | Prevention of blood clots in angioplasty |
| Rituximab | CD20 | Non-Hodgkin lymphoma |
| Palivizumab | RSV | Prevention of respiratory syncytial virus |
| | | infection |
| Infliximab | TNFα | Crohn's disease |
| Trastuzumab | HER2 | Breast cancer |
| Alemtuzumab | CD52 | Chronic myeloid leukemia |
| Adalimumab | TNFα | Rheumatoid arthritis |
| Ibritumomab | CD20 | Non-Hodgkin lymphoma |
| tiuxetan | | |
| Omalizumab | IgE | Asthma |
| Cetuximab | EGFR | Colorectal cancer |
| Bevacizumab | VEGF-A | Colorectal cancer |
| Natalizumab | ITGA4 | Multiple sclerosis |
| Panitumumab | EGFR | Colorectal cancer |
| Ranibizumab | VEGF-A | Macular degeneration |
| Eculizumab | C5 | Paroxysmal nocturnal hemoglobinuria |
| Certolizumab | TNFα | Crohn's disease |
| pegol | | |
| Ustekinumab | IL-12/23 | Psoriasis |
| Canakinumab | IL-1β | Muckle-Wells syndrome |
| Golimumab | TNFα | Rheumatoid and psoriatic arthritis, ankylosing |
| | | spondylitis |
| Ofatumumab | CD20 | Chronic lymphocytic leukemia |
| Tocilizumab | IL-6R | Rheumatoid arthritis |
| Denosumab | RANKE | Bone loss |
| Belimumab | BLyS | Systemic lupus erythematosus |
| Ipilimumab | CTLA-4 | Metastatic melanoma |
| Brentuximab | CD30 | Hodgkin lymphoma, systemic anaplastic large |
| vedotin | | cell lymphoma |
| Pertuzumab | HER2 | Breast Cancer |
| Trastuzumab | HER2 | Breast cancer |
| emtansine | | |
| Raxibacumab | B. anthrasis PA | Anthrax infection |
| Obinutuzumab | CD20 | Chronic lymphocytic leukemia |
| Siltuximab | IL-6 | Castleman disease |
| Ramucirumab | VEGFR2 | Gastric cancer |
| Vedolizumab | α4β7 integrin | Ulcerative colitis, Crohn disease |
| Blinatumomab | CD19, CD3 | Acute lymphoblastic leukemia |
| Nivolumab | PD-1 | Melanoma, non-small cell lung cancer |
| Pembrolizumab | PD-1 | Melanoma |
| Idarucizumab | Dabigatran | Reversal of dabigatran-induced anticoagulation |
| Necitumumab | EGFR | Non-small cell lung cancer |
| Dinutuximab | GD2 | Neuroblastoma |
| Secukinumab | IL-17a | Psoriasis |
| Mepolizumab | IL-5 | Severe eosinophilic asthma |
| Alirocumab | PCSK9 | High cholesterol |
| Evolocumab | PCSK9 | High cholesterol |
| Daratumumab | CD38 | Multiple myeloma |
| Elotuzumab | SLAMF7 | Multiple myeloma |
| Ixekizumab | IL-17α | Psoriasis |
| Reslizumab | IL-5 | Asthma |
| Olaratumab | PDGFRα | Soft tissue sarcoma |
| Bezlotoxumab | Clostridium difficile | Prevention of Clostridium difficile infection |
| | enterotoxin B | recurrence |
| Atezolizumab | PD-L1 | Bladder cancer |
| Obiltoxaximab | B. anthrasis PA | Prevention of inhalational anthrax |
| Inotuzumab | CD22 | Acute lymphoblastic leukemia |
| ozogamicin | | |
| Brodalumab | IL-17R | Plaque psoriasis |
| Guselkumab | IL-23 p19 | Plaque psoriasis |
| Dupilumab | IL-4Rα | Atopic dermatitis |
| Sarilumab | IL-6R | Rheumatoid arthritis |
| Avelumab | PD-L1 | Merkel cell carcinoma |
| Ocrelizumab | CD20 | Multiple sclerosis |
| Emicizumab | Factor IXa, X | Hemophilia A |
| Benralizumab | lL-5Rα | Asthma |
| Gemtuzumab | CD33 | Acute myeloid leukemia |
| ozogamicin | | |
| Durvalumab | PD-L1 | Bladder cancer |
| Burosumab | FGF23 | X-linked hypophosphatemia |
| Lanadelumab | Plasma kallikrein | Hereditary angioedema attacks |
| Mogamulizumab | CCR4 | Mycosis fungoides or Sézary syndrome |
| Erenumab | CGRPR | Migraine prevention |
| Galcanezumab | CGRP | Migraine prevention |
| Tildrakizumab | IL-23 p19 | Plaque psoriasis |
| Cemiplimab | PD-1 | Cutaneous squamous cell carcinoma |
| Emapalumab | IFNγ | Primary hemophagocytic lymphohistiocytosis |
| Fremanezumab | CGRP | Migraine prevention |
| Ibalizumab | CD4 | HIV infection |
| Moxetumomab | CD22 | Hairy cell leukemia |
| pasudodox | | |
| Ravulizumab | C5 | Paroxysmal nocturnal hemoglobinuria |
| Caplacizumab | von Willebrand factor | Acquired thrombotic thrombocytopenic purpura |
| Romosozumab | Sclerostin | Osteoporosis in postmenopausal women at |
| | | increased risk of fracture |
| Risankizumab | IL-23 p19 | Plaque psoriasis |
| Polatuzumab | CD79β | Diffuse large B-cell lymphoma |
| vedotin | | |
| Brolucizumab | VEGF-A | Macular degeneration |
| Crizanlizumab | P-selectin | Sickle cell disease |

### Applications

[0340] Using the systems described herein, optionally using any of delivery modalities described herein (including nanoparticle delivery modalities, such as lipid nanoparticles, and viral delivery modalities, such as AAVs), the invention also provides applications (methods) for modifying a DNA molecule, such as nuclear DNA, i.e., in the genome of a cell, whether in vitro, ex vivo, in situ, or in vivo, e.g, in a tissue in an organism, such as a subject including mammalian subjects, such as a human. By integrating coding genes into a DNA sequence template, the Gene Writer system can address therapeutic needs, for example, by providing expression of a therapeutic transgene (e.g., comprised in an object sequence as described herein) in individuals with loss-of-function mutations, by replacing gain-of-function mutations with normal transgenes, by providing regulatory sequences to eliminate gain-of-function mutation expression, and/or by controlling the expression of operably linked genes, transgenes and systems thereof. In certain embodiments, an object sequence (e.g., a heterologous object sequence) comprises a coding sequence encoding a functional element (e.g., a polypeptide or non-coding RNA, e.g., as described herein) specific to the therapeutic needs of the host cell. In some embodiments, an object sequence (e.g., a heterologous object sequence) comprises a promoter, for example, a tissue specific promotor or enhancer. In some embodiments, a promotor can be operably linked to a coding sequence.

[0341] In certain aspects, the invention this provides methods of modifying a target DNA strand in a cell, tissue or subject, comprising administering a system as described herein (optionally by a modality described herein) to the cell, tissue or subject, where the system inserts the heterologous object sequence into the target DNA strand, thereby modifying the target DNA strand. In certain embodiments, the heterologous object sequence is thus expressed in the cell, tissue, or subject. In some embodiments, the cell, tissue or subject is a mammalian (e.g., human) cell, tissue or subject. Exemplary cells thus modified include a hepatocyte, lung epithelium, an ionocyte. Such a cell may be a primary cell or otherwise not immortalized. In related aspects, the invention also provides methods of treating a mammalian tissue comprising administering a system as described herein to the mammal, thereby treating the tissue, wherein the tissue is deficient in the heterologous object sequence. In certain embodiments of any of the foregoing aspects and embodiments, the Gene Writer polypeptide is provided as a nucleic acid, which is present transiently.

[0342] In some embodiments, a system of the invention is capable of producing an insertion in target DNA. It is conceived that the systems described herein are capable of resulting in the expression of an exogenous non-coding nucleic acid, e.g., miRNA, lncRNA, shRNA, siRNA, tRNA, mtRNA, gRNA, or rRNA, expression of a protein coding sequence, e.g., a therapeutic protein or a regulatory protein, incorporation of a regulatory element, e.g., a promoter, enhancer, transcription factor binding site, epigenetic modifier site, miRNA binding site, splice donor or acceptor site, or a terminator sequence, or incorporation of other DNA sequence, e.g., spacer. Depending on the content and context of the insertion, it is thus possible to express an exogenous protein or alter expression of an endogenous protein or cellular system. In some embodiments, a Gene Writing system may be used to knockout an endogenous gene by insertional mutagenesis, e.g., by integration of an insert DNA into a coding or regulatory region. In some embodiments, a Gene Writing system may be used to simultaneously trigger expression of a transgene cassette, e.g., a CAR, while disrupting expression of an endogenous gene or locus, e.g., TRAC, by mediating integration of an insert DNA encoding the transgene cassette into the endogenous gene or locus. In some embodiments, a Gene Writing system may be used to substitute an allele by integrating a transgene expression cassette into the endogenous allele, thus disrupting its expression.

[0343] In embodiments, the Gene Writer™ gene editor system can provide an object sequence comprising, e.g., a therapeutic agent (e.g., a therapeutic transgene) expressing, e.g., replacement blood factors or replacement enzymes, e.g., lysosomal enzymes. For example, the compositions, systems and methods described herein are useful to express, in a target human genome, agalsidase alpha or beta for treatment of Fabry Disease; imiglucerase, taliglucerase alfa, velaglucerase alfa, or alglucerase for Gaucher Disease; sebelipase alpha for lysosomal acid lipase deficiency (Wolman disease/CESD); laronidase, idursulfase, elosulfase alpha, or galsulfase for mucopolysaccharidoses; alglucosidase alpha for Pompe disease. For example, the compositions, systems and methods described herein are useful to express, in a target human genome factor I, II, V, VII, X, XI, XII or XIII for blood factor deficiencies.

[0344] In some embodiments, the heterologous object sequence encodes an intracellular protein (e.g., a cytoplasmic protein, a nuclear protein, an organellar protein such as a mitochondrial protein or lysosomal protein, or a membrane protein). In some embodiments, the heterologous object sequence encodes a membrane protein, e.g., a membrane protein other than a CAR, and/or an endogenous human membrane protein. In some embodiments, the heterologous object sequence encodes an extracellular protein. In some embodiments, the heterologous object sequence encodes an enzyme, a structural protein, a signaling protein, a regulatory protein, a transport protein, a sensory protein, a motor protein, a defense protein, or a storage protein. Other proteins include an immune receptor protein, e.g. a synthetic immune receptor protein such as a chimeric antigen receptor protein (CAR), a T cell receptor, a B cell receptor, or an antibody.

[0345] A Gene Writing™ system may be used to modify immune cells. In some embodiments, a Gene Writing™ system may be used to modify T cells. In some embodiments, T-cells may include any subpopulation of T-cells, e.g., CD4+, CD8+, gamma-delta, naïve T cells, stem cell memory T cells, central memory T cells, or a mixture of subpopulations. In some embodiments, a Gene Writing™ system may be used to deliver or modify a T-cell receptor (TCR) in a T cell. In some embodiments, a Gene Writing™ system may be used to deliver at least one chimeric antigen receptor (CAR) to T-cells. In some embodiments, a Gene Writing™ system may be used to deliver at least one CAR to natural killer (NK) cells. In some embodiments, a Gene Writing™ system may be used to deliver at least one CAR to natural killer T (NKT) cells. In some embodiments, a Gene Writing™ system may be used to deliver at least one CAR to a progenitor cell, e.g., a progenitor cell of T, NK, or NKT cells. In some embodiments, cells modified with at least one CAR (e.g., CAR-T cells, CAR-NK cells, CAR-NKT cells), or a combination of cells modified with at least one CAR (e.g., a mixture of CAR-NK/T cells) are used to treat a condition as identified in the targetable landscape of CAR therapies in MacKay, et al. Nat Biotechnol 38, 233-244 (2020), incorporated by reference herein in its entirety. In some embodiments, the immune cells comprise a CAR specific to a tumor or a pathogen antigen selected from a group consisting of AChR (fetal acetylcholine receptor), ADGRE2, AFP (alpha fetoprotein), BAFF-R, BCMA, CAIX (carbonic anhydrase IX), CCR1, CCR4, CEA (carcinoembryonic antigen), CD3, CD5, CD8, CD7, CD10, CD13, CD14, CD15, CD19, CD20, CD22, CD30, CD33, CLLI, CD34, CD38, CD41, CD44, CD49f, CD56, CD61, CD64, CD68, CD70, CD74, CD99, CD117, CD123, CD133, CD138, CD44v6, CD267, CD269, CD S, CLEC12A, CS1, EGP-2 (epithelial glycoprotein-2), EGP-40 (epithelial glycoprotein-40), EGFR(HER1), EGFR-VIII, EpCAM (epithelial cell adhesion molecule), EphA2, ERBB2 (HER2, human epidermal growth factor receptor 2), ERBB3, ERBB4, FBP (folate-binding protein), Flt3 receptor, folate receptor-a, GD2 (ganglioside G2), GD3 (ganglioside G3), GPC3 (glypican-3), GPI00, hTERT (human telomerase reverse transcriptase), ICAM-1, integrin B7, interleukin 6 receptor, IL13Ra2 (interleukin-13 receptor 30 subunit alpha-2), kappa-light chain, KDR (kinase insert domain receptor), LeY (Lewis Y), L1CAM (LI cell adhesion molecule), LILRB2 (leukocyte immunoglobulin like receptor B2), MARTI, MAGE-A1 (melanoma associated antigen A1), MAGE-A3, MSLN (mesothelin), MUC16 (mucin 16), MUCI (mucin I), KG2D ligands, NY-ESO-1 (cancer-testis antigen), PM (proteinase 3), TRBCI, TRBC2, TFM-3, TACI, tyrosinase, survivin, hTERT, oncofetal antigen (h5T4), p53, PSCA (prostate stem cell antigen), PSMA (prostate-specific membrane antigen), hROR1, TAG-72 (tumor-associated glycoprotein 72), VEGF-R2 (vascular endothelial growth factor R2), WT-1 (Wilms tumor protein), and antigens of HIV (human immunodeficiency virus), hepatitis B, hepatitis C, CMV (cytomegalovirus), EBV (Epstein-Barr virus), HPV (human papilloma virus).

[0346] In some embodiments, immune cells, e.g., T-cells, NK cells, NKT cells, or progenitor cells are modified ex vivo and then delivered to a patient. In some embodiments, a Gene Writer™ system is delivered by one of the methods mentioned herein, and immune cells, e.g., T-cells, NK cells, NKT cells, or progenitor cells are modified in vivo in the patient.

[0347] In some embodiments, a Gene Writing system can be used to make multiple modifications to a target cell, either simultaneously or sequentially. In some embodiments, a Gene Writing system can be used to further modify an already modified cell. In some embodiments, a Gene Writing system can be use to modify a cell edited by a complementary technology, e.g., a gene edited cell, e.g., a cell with one or more CRISPR knockouts. In some embodiments, the previously edited cell is a T-cell. In some embodiments, the previous modifications comprise gene knockouts in a T-cell, e.g., endogenous TCR (e.g., TRAC, TRBC), HLA Class I (B2M), PD1, CD52, CTLA-4, TIM-3, LAG-3, DGK. In some embodiments, a Gene Writing system is used to insert a TCR or CAR into a T-cell that has been previously modified.

### Administration

[0348] The composition and systems described herein may be used in vitro or in vivo. In some embodiments the system or components of the system are delivered to cells (e.g., mammalian cells, e.g., human cells), e.g., in vitro or in vivo. The skilled artisan will understand that the components of the Gene Writer system may be delivered in the form of polypeptide, nucleic acid (e.g., DNA, RNA), and combinations thereof.

[0349] In some embodiments, the system and/or components of the system are delivered as nucleic acids. For example, the recombinase polypeptide may be delivered in the form of a DNA or RNA encoding the recombinase polypeptide. In some embodiments the system or components of the system (e.g., an insert DNA and a recombinase polypeptide-encoding nucleic acid molecule) are delivered on 1, 2, 3, 4, or more distinct nucleic acid molecules. In some embodiments the system or components of the system are delivered as a combination of DNA and RNA. In some embodiments the system or components of the system are delivered as a combination of DNA and protein. In some embodiments the system or components of the system are delivered as a combination of RNA and protein. In some embodiments the recombinase polypeptide is delivered as a protein.

[0350] In some embodiments the system or components of the system are delivered to cells, e.g. mammalian cells or human cells, using a vector. The vector may be, e.g., a plasmid or a virus. In some embodiments delivery is in vivo, in vitro, ex vivo, or in situ. In some embodiments the virus is an adeno associated virus (AAV), a lentivirus, an adenovirus. In some embodiments the system or components of the system are delivered to cells with a viral-like particle or a virosome. In some embodiments the delivery uses more than one virus, viral-like particle or virosome.

[0351] In some embodiments, the recombinase is active upon linear or circular single or double stranded DNA. In some embodiments, the recombinase is active upon DNA after it is converted from single stranded to double stranded in the cell. In some embodiments, the recombinase is active upon DNA after it has formed a concatemer in the cell. In some embodiments, the recombinase polypeptide is delivered to or expressed in the cell after the insert DNA is converted from single to double stranded.

[0352] In some embodiments, recombinase recognition sequences are present 5′ and 3′ of the nucleic acid encoding the recombinase polypeptide. In some embodiments, the recombinase recognition sequences are an attB and an attP with compatible spacer regions and central dinucleotides. In some embodiments, the recombinase recognition sequences have a different spacer region and/or central dinucleotide than the recombinase recognition sequences on the insert DNA or at a target site in the genome. In some embodiments, the recombinase recognition sites do not interact with the recombinase recognition sites on the insert DNA or in the genome. In some embodiments the recombinase recognition sequences are directly adjacent to the nucleic acid encoding the open reading frame of the recombinase polypeptide. In some embodiments the recombinase recognition sequences are external to a gene expression unit for the recombinase. In some embodiments the recombinase recognition sequences (e.g. attB and attP) are in the same 5′ to 3′ orientation. In some embodiments the recombinase recognition sequences (e.g. attB and attP) are in the opposite 5′ to 3′ orientation. In some embodiments, the recombinase polypeptide recombines the recognition sequences that are 5′ and 3′ of the nucleic acid encoding the recombinase polypeptide, resulting in a decrease of recombinase gene expression.

[0353] In some embodiments, multiple recombinase recognition sequences are present on the insert DNA. In some embodiments, the insert DNA comprises two or more recognition sequences. In some embodiments, the insert DNA comprises three or more recognition sequences. In some embodiments, the insert DNA comprises two recognition sequences (e.g. an attB and attP) that are compatible with each other, and a third recognition sequence (e.g. an attB or an attP) that is incompatible with the other recognition sequences on the insert DNA. In some embodiments, the recognition sequences on the insert DNA that are compatible with each other are not compatible with recognition sequences in the target genome. In some embodiments, the recognition sequence on the insert DNA that is incompatible with the other recognition sequences on the insert DNA is compatible with recognition sequences in the target genome. In some embodiments the recognition sequences that are compatible with each other have compatible spacer regions and central dinucleotides, and the recognition sequences that are incompatible have incompatible spacer regions and central dinucleotides. In some embodiments, the compatible recognition sequences on the insert DNA are in the same 5′ to 3′ orientation. In some embodiments, the recombinase acts upon the compatible recognition sequences on the insert DNA to form a circular DNA. In some embodiments, the resulting circular DNA comprises an attL, attR, and either an attP or attB sequence, wherein the attP or attB sequence is compatible with recognition sequences in the target genome. In some embodiments, the multiple recombinase recognition sequences described herein are present in a viral vector genome.

[0354] In one embodiment, the compositions and systems described herein can be formulated in liposomes or other similar vesicles. Liposomes are spherical vesicle structures composed of a uni- or multilamellar lipid bilayer surrounding internal aqueous compartments and a relatively impermeable outer lipophilic phospholipid bilayer. Liposomes may be anionic, neutral or cationic. Liposomes are biocompatible, nontoxic, can deliver both hydrophilic and lipophilic drug molecules, protect their cargo from degradation by plasma enzymes, and transport their load across biological membranes and the blood brain barrier (BBB) (see, e.g., Spuch and Navarro, Journal of Drug Delivery, vol. 2011, Article ID 469679, 12 pages, 2011. doi:10.1155/2011/469679 for review).

[0355] Vesicles can be made from several different types of lipids; however, phospholipids are most commonly used to generate liposomes as drug carriers. Methods for preparation of multilamellar vesicle lipids are known in the art (see for example U.S. Pat. No. 6,693,086, the teachings of which relating to multilamellar vesicle lipid preparation are incorporated herein by reference). Although vesicle formation can be spontaneous when a lipid film is mixed with an aqueous solution, it can also be expedited by applying force in the form of shaking by using a homogenizer, sonicator, or an extrusion apparatus (see, e.g., Spuch and Navarro, Journal of Drug Delivery, vol. 2011, Article ID 469679, 12 pages, 2011. doi:10.1155/2011/469679 for review). Extruded lipids can be prepared by extruding through filters of decreasing size, as described in Templeton et al., Nature Biotech, 15:647-652, 1997, the teachings of which relating to extruded lipid preparation are incorporated herein by reference.

[0356] Lipid nanoparticles are another example of a carrier that provides a biocompatible and biodegradable delivery system for the pharmaceutical compositions described herein. Nanostructured lipid carriers (NLCs) are modified solid lipid nanoparticles (SLNs) that retain the characteristics of the SLN, improve drug stability and loading capacity, and prevent drug leakage. Polymer nanoparticles (PNPs) are an important component of drug delivery. These nanoparticles can effectively direct drug delivery to specific targets and improve drug stability and controlled drug release. Lipid-polymer nanoparticles (PLNs), a new type of carrier that combines liposomes and polymers, may also be employed. These nanoparticles possess the complementary advantages of PNPs and liposomes. A PLN is composed of a core-shell structure; the polymer core provides a stable structure, and the phospholipid shell offers good biocompatibility. As such, the two components increase the drug encapsulation efficiency rate, facilitate surface modification, and prevent leakage of water-soluble drugs. For a review, see, e.g., Li et al. 2017, Nanomaterials 7, 122; doi:10.3390/nano7060122.

[0357] Exosomes can also be used as drug delivery vehicles for the compositions and systems described herein. For a review, see Ha et al. July 2016. Acta Pharmaceutica Sinica B. Volume 6, Issue 4, Pages 287-296; https://doi.org/10.1016/j.apsb.2016.02.001.

[0358] In some embodiments, at least one component of a system described herein comprises a fusosome. Fusosomes interact and fuse with target cells, and thus can be used as delivery vehicles for a variety of molecules. They generally consist of a bilayer of amphipathic lipids enclosing a lumen or cavity and a fusogen that interacts with the amphipathic lipid bilayer. The fusogen component has been shown to be engineerable in order to confer target cell specificity for the fusion and payload delivery, allowing the creation of delivery vehicles with programmable cell specificity (see, for example, the sections relating to fusosome design, preparation, and usage in PCT Publication No. WO/2020014209, incorporated herein by reference in its entirety).

[0359] A Gene Writer system can be introduced into cells, tissues and multicellular organisms. In some embodiments the system or components of the system are delivered to the cells via mechanical means or physical means.

[0360] Formulation of protein therapeutics is described in Meyer (Ed.), Therapeutic Protein Drug Products: Practical Approaches to formulation in the Laboratory, Manufacturing, and the Clinic, Woodhead Publishing Series (2012).

[0361] In some embodiments, a Gene Writer™ system described herein is delivered to a tissue or cell from the cerebrum, cerebellum, adrenal gland, ovary, pancreas, parathyroid gland, hypophysis, testis, thyroid gland, breast, spleen, tonsil, thymus, lymph node, bone marrow, lung, cardiac muscle, esophagus, stomach, small intestine, colon, liver, salivary gland, kidney, prostate, blood, or other cell or tissue type. In some embodiments, a Gene Writer™ system described herein is used to treat a disease, such as a cancer, inflammatory disease, infectious disease, genetic defect, or other disease. A cancer can be cancer of the cerebrum, cerebellum, adrenal gland, ovary, pancreas, parathyroid gland, hypophysis, testis, thyroid gland, breast, spleen, tonsil, thymus, lymph node, bone marrow, lung, cardiac muscle, esophagus, stomach, small intestine, colon, liver, salivary gland, kidney, prostate, blood, or other cell or tissue type, and can include multiple cancers.

[0362] In some embodiments, a Gene Writer™ system described herein described herein is administered by enteral administration (e.g. oral, rectal, gastrointestinal, sublingual, sublabial, or buccal administration). In some embodiments, a Gene Writer™ system described herein is administered by parenteral administration (e.g., intravenous, intramuscular, subcutaneous, intradermal, epidural, intracerebral, intracerebroventricular, epicutaneous, nasal, intra-arterial, intra-articular, intracavernous, intraocular, intraosseous infusion, intraperitoneal, intrathecal, intrauterine, intravaginal, intravesical, perivascular, or transmucosal administration). In some embodiments, a Gene Writer™ system described herein is administered by topical administration (e.g., transdermal administration).

[0363] In some embodiments, a Gene Writer™ system as described herein can be used to modify an animal cell, plant cell, or fungal cell. In some embodiments, a Gene Writer™ system as described herein can be used to modify a mammalian cell (e.g., a human cell). In some embodiments, a Gene Writer™ system as described herein can be used to modify a cell from a livestock animal (e.g., a cow, horse, sheep, goat, pig, llama, alpaca, camel, yak, chicken, duck, goose, or ostrich). In some embodiments, a Gene Writer™ system as described herein can be used as a laboratory tool or a research tool, or used in a laboratory method or research method, e.g., to modify an animal cell, e.g., a mammalian cell (e.g., a human cell), a plant cell, or a fungal cell.

[0364] In some embodiments, a Gene Writer™ system as described herein can be used to express a protein, template, or heterologous object sequence (e.g., in an animal cell, e.g., a mammalian cell (e.g., a human cell), a plant cell, or a fungal cell). In some embodiments, a Gene Writer™ system as described herein can be used to express a protein, template, or heterologous object sequence under the control of an inducible promoter (e.g., a small molecule inducible promoter). In some embodiments, a Gene Writing system or payload thereof is designed for tunable control, e.g., by the use of an inducible promoter. For example, a promoter, e.g., Tet, driving a gene of interest may be silent at integration, but may, in some instances, activated upon exposure to a small molecule inducer, e.g., doxycycline. In some embodiments, the tunable expression allows post-treatment control of a gene (e.g., a therapeutic gene), e.g., permitting a small molecule-dependent dosing effect. In embodiments, the small molecule-dependent dosing effect comprises altering levels of the gene product temporally and/or spatially, e.g., by local administration. In some embodiments, a promoter used in a system described herein may be inducible, e.g., responsive to an endogenous molecule of the host and/or an exogenous small molecule administered thereto.

### Treatment of Suitable Indications

[0365] In some embodiments, a Gene Writer™ system described herein, or a component or portion thereof (e.g., a polypeptide or nucleic acid as described herein), is used to treat a disease, disorder, or condition. In some embodiments, the Gene Writer™ system described herein, or component or portion thereof, is used to treat a disease, disorder, or condition listed in any of Tables X1-X6. In some embodiments, the Gene Writer™ system described herein, or component or portion thereof, is used to treat a hematopoietic stem cell (HSC) disease, disorder, or condition, e.g., as listed in Table X1. In some embodiments, the Gene Writer™ system described herein, or component or portion thereof, is used to treat a kidney disease, disorder, or condition, e.g., as listed in Table X2. In some embodiments, the Gene Writer™ system described herein, or component or portion thereof, is used to treat a liver disease, disorder, or condition, e.g., as listed in Table X3. In some embodiments, the Gene Writer™ system described herein, or component or portion thereof, is used to treat a lung disease, disorder, or condition, e.g., as listed in Table X4. In some embodiments, the Gene Writer™ system described herein, or component or portion thereof, is used to treat a skeletal muscle disease, disorder, or condition, e.g., as listed in Table X5. In some embodiments, the Gene Writer™ system described herein, or component or portion thereof, is used to treat a skin disease, disorder, or condition, e.g., as listed in Table X6.

[0366] Tables X1-X6: Indications selected for trans Gene Writers to be used for recombinases

TABLE X1
HSCs

| Disease | Gene Affected |
|---|---|
| Adrenoleukodystrophy (CALD) | ABCD1 |
| Alpha-mannosidosis | MAN2B1 |
| Fanconi anemia | FANCA; FANCC; FANCG |
| Gaucher disease | GBA |
| Globoid cell leukodystrophy (Krabbe disease) | GALC |
| Hemophagocytic lymphohistiocytosis | PRF1; STX11; STXBP2; UNC13D |
| Malignant infantile osteopetrosis- autosomal | TCIRG1; Many genes implicated |
| recessive osteopetrosis | |
| Metachromatic leukodystrophy | ARSA; PSAP |
| MPS 1S (Scheie syndrome) | IDUA |
| MPS2 | IDS |
| MPS7 | GUSB |
| Mucolipidosis II | GNPTAB |
| Niemann-Pick disease A and B | SMPD1 |
| Niemann-Pick disease C | NPC1 |
| Pompe disease | GAA |
| Sickle cell disease (SCD) | HBB |
| Tay Sachs | HEXA |
| Thalassemia | HBB |

TABLE X2
Kidney

| Disease | Gene Affected |
|---|---|
| Congenital nephrotic syndrome | NPHS2 |
| Cystinosis | CTNS |

TABLE X3
Liver

| Disease | Gene Affected |
|---|---|
| Acute intermittent porphyria | HMBS |
| Alagille syndrome | JAG1 |
| Alpha-1 antitrypsin deficiency | SERPINA1 |
| Carbamoyl phosphate synthetase I deficiency | CPS1 |
| Citrullinemia I | ASS1 |
| Crigler-Najjar | UGT1A1 |
| Fabry | LPL |
| Familial chylomicronemia syndrome | GLA |
| Gaucher | GBE1 |
| GSD1a | G6Pase |
| GSD IV | GBA |
| Heme A | F8 |
| Heme B | F9 |
| HoFH | LDLRAP1 |
| Methylmalonic acidemia | Type Ia: BCKDHA |
| | Type Ib: BCKDHB |
| | Type II: DBT |
| MPS II | MMUT |
| MPS III | IDS |
| MPS IV | Type IIIa: SGSH |
| | Type IIIb: NAGLU |
| | Type IIIc: HGSNAT |
| | Type IIId: GNS |
| MPS VI | Type IVA: GALNS |
| | Type IVB: GLB1 |
| MSUD | ARSB |
| OTC Deficiency | OTC |
| Polycystic Liver Disease | PRKCSH |
| Pompe | GAA |
| Primary Hyperoxaluria 1 | AGXT (HAO1 or LDHA for CRISPR) |
| Progressive familial intrahepatic cholestasis type 1 | ATP8B1 |
| Progressive familial intrahepatic cholestasis type 2 | ABCB11 |
| Progressive familial intrahepatic cholestasis type 3 | ABCB4 |
| Propionic acidemia | PCCB; PCCA |
| Wilson's Disease | ATP7B |

TABLE X4
Lung

| Disease | Gene Affected |
|---|---|
| Alpha-1 antitrypsin deficiency | SERPINA1 |
| Cystic fibrosis | CFTR |
| Primary ciliary dyskinesia | DNAI1 |
| Primary ciliary dyskinesia | DNAH5 |
| Primary pulmonary hypertension I | BMPR2 |
| Surfactant Protein B (SP-B) Deficiency | SFTPB |
| (pulmonary surfactant metabolism dysfunction 1) | |

TABLE X5
Skeletal muscle

| Disease | Gene Affected |
|---|---|
| Becker muscular dystrophy | DMD |
| Becker myotonia | CLCN1 |
| Bethlem myopathy | COL6A2 |
| Centronuclear myopathy, X-linked (motubular) | MTM1 |
| Congenital myasthenic syndrome | CHRNE |
| Duchenne muscular dystrophy | DMD |
| Emery-Dreifuss muscular dystrophy, AD | LMNA |
| Limb-girdle muscular dystrophy 2A | CAPN3 |
| Limb-girdle muscular dystrophy, type 2D | SGCA |

TABLE X6
Skin

| Disease | Gene Affected |
|---|---|
| Epidermolysis Bullosa Dystrophica Recessive | COL7A1 |
| (Hallopeau-Siemens) | |
| Epidermolysis Bullosa Junctional | LAMB3 |
| Epidermolytic Ichthyosis | KRT1; KRT10 |
| Hailey-Hailey Disease | ATP2C1 |
| Lamellar Ichthyosis/Nonbullous Congenital | TGM1 |
| Ichthyosiform Erythroderma (ARCI) | |
| Netherton Syndrome | SPINK5 |

[0367] In some embodiments, a Gene Writing system may be used to treat a healthy individual, e.g., as a preventative therapy. Gene Writing systems can, in some embodiments, be targeted to generate mutations, e.g., knockout mutations, that have been shown to be protective towards a disease of interest. In some embodiments, a Gene Writing system can be used to insert a protective allele into the genome, e.g., a transgene that expresses a variant of a protein that reduces the risk of developing a particular disease. In some embodiments, integration of a transgene is used to increase the levels of an endogenous protein by providing one or more additional copies. In some embodiments, a Gene Writing system may be used to incorporate a regulatory element, e.g., promoter, enhancer, transcription factor binding site, miRNA binding site, or epigenetic modification site, to alter the expression of an endogenous gene to reduce disease risk or lessen its severity. In some embodiments, a Gene Writing system may be used to replace one or more exons of an endogenous protein to remove an allele that increases disease risk or to alter an allele to one that confers disease protection.

### Plant-Modification Methods

[0368] Gene Writer systems described herein may be used to modify a plant or a plant part (e.g., leaves, roots, flowers, fruits, or seeds), e.g., to increase the fitness of a plant.

[0369] A. Delivery to a Plant

[0370] Provided herein are methods of delivering a Gene Writer system described herein to a plant. Included are methods for delivering a Gene Writer system to a plant by contacting the plant, or part thereof, with a Gene Writer system. The methods are useful for modifying the plant to, e.g., increase the fitness of a plant.

[0371] More specifically, in some embodiments, a nucleic acid described herein (e.g., a nucleic acid encoding a GeneWriter) may be encoded in a vector, e.g., inserted adjacent to a plant promoter, e.g., a maize ubiquitin promoter (ZmUBI) in a plant vector (e.g., pHUC411). In some embodiments, the nucleic acids described herein are introduced into a plant (e.g., japonica rice) or part of a plant (e.g., a callus of a plant) via agrobacteria. In some embodiments, the systems and methods described herein can be used in plants by replacing a plant gene (e.g., hygromycin phosphotransferase (HPT)) with a null allele (e.g., containing a base substitution at the start codon). Systems and methods for modifying a plant genome are described in Xu et. al. Development of plant prime-editing systems for precise genome editing, 2020, Plant Communications.

[0372] In one aspect, provided herein is a method of increasing the fitness of a plant, the method including delivering to the plant the Gene Writer system described herein (e.g., in an effective amount and duration) to increase the fitness of the plant relative to an untreated plant (e.g., a plant that has not been delivered the Gene Writer system).

[0373] An increase in the fitness of the plant as a consequence of delivery of a Gene Writer system can manifest in a number of ways, e.g., thereby resulting in a better production of the plant, for example, an improved yield, improved vigor of the plant or quality of the harvested product from the plant, an improvement in pre- or post-harvest traits deemed desirable for agriculture or horticulture (e.g., taste, appearance, shelf life), or for an improvement of traits that otherwise benefit humans (e.g., decreased allergen production). An improved yield of a plant relates to an increase in the yield of a product (e.g., as measured by plant biomass, grain, seed or fruit yield, protein content, carbohydrate or oil content or leaf area) of the plant by a measurable amount over the yield of the same product of the plant produced under the same conditions, but without the application of the instant compositions or compared with application of conventional plant-modifying agents. For example, yield can be increased by at least about 0.5%, about 1%, about 2%, about 3%, about 4%, about 5%, about 10%, about 20%, about 30%, about 40%, about 50%, about 60%, about 70%, about 80%, about 90%, about 100%, or more than 100%. In some instances, the method is effective to increase yield by about 2×-fold, 5×-fold, 10×-fold, 25×-fold, 50×-fold, 75×-fold, 100×-fold, or more than 100×-fold relative to an untreated plant. Yield can be expressed in terms of an amount by weight or volume of the plant or a product of the plant on some basis. The basis can be expressed in terms of time, growing area, weight of plants produced, or amount of a raw material used. For example, such methods may increase the yield of plant tissues including, but not limited to: seeds, fruits, kernels, bolls, tubers, roots, and leaves.

[0374] An increase in the fitness of a plant as a consequence of delivery of a Gene Writer system can also be measured by other means, such as an increase or improvement of the vigor rating, the stand (the number of plants per unit of area), plant height, stalk circumference, stalk length, leaf number, leaf size, plant canopy, visual appearance (such as greener leaf color), root rating, emergence, protein content, increased tillering, bigger leaves, more leaves, less dead basal leaves, stronger tillers, less fertilizer needed, less seeds needed, more productive tillers, earlier flowering, early grain or seed maturity, less plant verse (lodging), increased shoot growth, earlier germination, or any combination of these factors, by a measurable or noticeable amount over the same factor of the plant produced under the same conditions, but without the administration of the instant compositions or with application of conventional plant-modifying agents.

[0375] Accordingly, provided herein is a method of modifying a plant, the method including delivering to the plant an effective amount of any of the Gene Writer systems provided herein, wherein the method modifies the plant and thereby introduces or increases a beneficial trait in the plant (e.g., by about 1%, 2%, 5%, 10%, 20%, 30%, 40%, 50%, 60%, 70%, 80%, 90%, 100%, or more than 100%) relative to an untreated plant. In particular, the method may increase the fitness of the plant (e.g., by about 1%, 2%, 5%, 10%, 20%, 30%, 40%, 50%, 60%, 70%, 80%, 90%, 100%, or more than 100%) relative to an untreated plant.

[0376] In some instances, the increase in plant fitness is an increase (e.g., by about 1%, 2%, 5%, 10%, 20%, 30%, 40%, 50%, 60%, 70%, 80%, 90%, 100%, or more than 100%) in disease resistance, drought tolerance, heat tolerance, cold tolerance, salt tolerance, metal tolerance, herbicide tolerance, chemical tolerance, water use efficiency, nitrogen utilization, resistance to nitrogen stress, nitrogen fixation, pest resistance, herbivore resistance, pathogen resistance, yield, yield under water-limited conditions, vigor, growth, photosynthetic capability, nutrition, protein content, carbohydrate content, oil content, biomass, shoot length, root length, root architecture, seed weight, or amount of harvestable produce.

[0377] In some instances, the increase in fitness is an increase (e.g., by about 1%, 2%, 5%, 10%, 20%, 30%, 40%, 50%, 60%, 70%, 80%, 90%, 100%, or more than 100%) in development, growth, yield, resistance to abiotic stressors, or resistance to biotic stressors. An abiotic stress refers to an environmental stress condition that a plant or a plant part is subjected to that includes, e.g., drought stress, salt stress, heat stress, cold stress, and low nutrient stress. A biotic stress refers to an environmental stress condition that a plant or plant part is subjected to that includes, e.g. nematode stress, insect herbivory stress, fungal pathogen stress, bacterial pathogen stress, or viral pathogen stress. The stress may be temporary, e.g. several hours, several days, several months, or permanent, e.g. for the life of the plant.

[0378] In some s 10%, 20%, 30%, 40%, 50%, 60%, 70%, 80%, 90%, 100%, or more than 100%) in quality of products harvested from the plant. For example, the increase in plant fitness may be an improvement in commercially favorable features (e.g., taste or appearance) of a product harvested from the plant. In other instances, the increase in plant fitness is an increase in shelf-life of a product harvested from the plant (e.g., by about 1%, 2%, 5%, 10%, 20%, 30%, 40%, 50%, 60%, 70%, 80%, 90%, 100%, or more than 100%).

[0379] Alternatively, the increase in fitness may be an alteration of a trait that is beneficial to human or animal health, such as a reduction in allergen production. For example, the increase in fitness may be a decrease (e.g., by about 1%, 2%, 5%, 10%, 20%, 30%, 40%, 50%, 60%, 70%, 80%, 90%, 100%, or more than 100%) in production of an allergen (e.g., pollen) that stimulates an immune response in an animal (e.g., human).

[0380] The modification of the plant (e.g., increase in fitness) may arise from modification of one or more plant parts. For example, the plant can be modified by contacting leaf, seed, pollen, root, fruit, shoot, flower, cells, protoplasts, or tissue (e.g., meristematic tissue) of the plant. As such, in another aspect, provided herein is a method of increasing the fitness of a plant, the method including contacting pollen of the plant with an effective amount of any of the plant-modifying compositions herein, wherein the method increases the fitness of the plant (e.g., by about 1%, 2%, 5%, 10%, 20%, 30%, 40%, 50%, 60%, 70%, 80%, 90%, 100%, or more than 100%) relative to an untreated plant.

[0381] In yet another aspect, provided herein is a method of increasing the fitness of a plant, the method including contacting a seed of the plant with an effective amount of any of the Gene Writer systems disclosed herein, wherein the method increases the fitness of the plant (e.g., by about 1%, 2%, 5%, 10%, 20%, 30%, 40%, 50%, 60%, 70%, 80%, 90%, 100%, or more than 100%) relative to an untreated plant.

[0382] In another aspect, provided herein is a method including contacting a protoplast of the plant with an effective amount of any of the Gene Writer systems described herein, wherein the method increases the fitness of the plant (e.g., by about 1%, 2%, 5%, 10%, 20%, 30%, 40%, 50%, 60%, 70%, 80%, 90%, 100%, or more than 100%) relative to an untreated plant.

[0383] In a further aspect, provided herein is a method of increasing the fitness of a plant, the method including contacting a plant cell of the plant with an effective amount of any of the Gene Writer system described herein, wherein the method increases the fitness of the plant (e.g., by about 1%, 2%, 5%, 10%, 20%, 30%, 40%, 50%, 60%, 70%, 80%, 90%, 100%, or more than 100%) relative to an untreated plant.

[0384] In another aspect, provided herein is a method of increasing the fitness of a plant, the method including contacting meristematic tissue of the plant with an effective amount of any of the plant-modifying compositions herein, wherein the method increases the fitness of the plant (e.g., by about 1%, 2%, 5%, 10%, 20%, 30%, 40%, 50%, 60%, 70%, 80%, 90%, 100%, or more than 100%) relative to an untreated plant.

[0385] In another aspect, provided herein is a method of increasing the fitness of a plant, the method including contacting an embryo of the plant with an effective amount of any of the plant-modifying compositions herein, wherein the method increases the fitness of the plant (e.g., by about 1%, 2%, 5%, 10%, 20%, 30%, 40%, 50%, 60%, 70%, 80%, 90%, 100%, or more than 100%) relative to an untreated plant.

[0386] B. Application Methods

[0387] A plant described herein can be exposed to any of the Gene Writer system compositions described herein in any suitable manner that permits delivering or administering the composition to the plant. The Gene Writer system may be delivered either alone or in combination with other active (e.g., fertilizing agents) or inactive substances and may be applied by, for example, spraying, injection (e.g., microinjection), through plants, pouring, dipping, in the form of concentrated liquids, gels, solutions, suspensions, sprays, powders, pellets, briquettes, bricks and the like, formulated to deliver an effective concentration of the plant-modifying composition. Amounts and locations for application of the compositions described herein are generally determined by the habitat of the plant, the lifecycle stage at which the plant can be targeted by the plant-modifying composition, the site where the application is to be made, and the physical and functional characteristics of the plant-modifying composition.

[0388] In some instances, the composition is sprayed directly onto a plant, e.g., crops, by e.g., backpack spraying, aerial spraying, crop spraying/dusting etc. In instances where the Gene Writer system is delivered to a plant, the plant receiving the Gene Writer system may be at any stage of plant growth. For example, formulated plant-modifying compositions can be applied as a seed-coating or root treatment in early stages of plant growth or as a total plant treatment at later stages of the crop cycle. In some instances, the plant-modifying composition may be applied as a topical agent to a plant.

[0389] Further, the Gene Writer system may be applied (e.g., in the soil in which a plant grows, or in the water that is used to water the plant) as a systemic agent that is absorbed and distributed through the tissues of a plant. In some instances, plants or food organisms may be genetically transformed to express the Gene Writer system.

[0390] Delayed or continuous release can also be accomplished by coating the Gene Writer system or a composition with the plant-modifying composition(s) with a dissolvable or bioerodable coating layer, such as gelatin, which coating dissolves or erodes in the environment of use, to then make the plant-modifying com Gene Writer system position available, or by dispersing the agent in a dissolvable or erodable matrix. Such continuous release and/or dispensing means devices may be advantageously employed to consistently maintain an effective concentration of one or more of the plant-modifying compositions described herein.

[0391] In some instances, the Gene Writer system is delivered to a part of the plant, e.g., a leaf, seed, pollen, root, fruit, shoot, or flower, or a tissue, cell, or protoplast thereof. In some instances, the Gene Writer system is delivered to a cell of the plant. In some instances, the Gene Writer system is delivered to a protoplast of the plant. In some instances, the Gene Writer system is delivered to a tissue of the plant. For example, the composition may be delivered to meristematic tissue of the plant (e.g., apical meristem, lateral meristem, or intercalary meristem). In some instances, the composition is delivered to permanent tissue of the plant (e.g., simple tissues (e.g., parenchyma, collenchyma, or sclerenchyma) or complex permanent tissue (e.g., xylem or phloem)). In some instances, the Gene Writer system is delivered to a plant embryo.

[0392] C. Plants

[0393] A variety of plants can be delivered to or treated with a Gene Writer system described herein. Plants that can be delivered a Gene Writer system (i.e., “treated”) in accordance with the present methods include whole plants and parts thereof, including, but not limited to, shoot vegetative organs/structures (e.g., leaves, stems and tubers), roots, flowers and floral organs/structures (e.g., bracts, sepals, petals, stamens, carpels, anthers and ovules), seed (including embryo, endosperm, cotyledons, and seed coat) and fruit (the mature ovary), plant tissue (e.g., vascular tissue, ground tissue, and the like) and cells (e.g., guard cells, egg cells, and the like), and progeny of same. Plant parts can further refer parts of the plant such as the shoot, root, stem, seeds, stipules, leaves, petals, flowers, ovules, bracts, branches, petioles, internodes, bark, pubescence, tillers, rhizomes, fronds, blades, pollen, stamen, and the like.

[0394] The class of plants that can be treated in a method disclosed herein includes the class of higher and lower plants, including angiosperms (monocotyledonous and dicotyledonous plants), gymnosperms, ferns, horsetails, psilophytes, lycophytes, bryophytes, and algae (e.g., multicellular or unicellular algae). Plants that can be treated in accordance with the present methods further include any vascular plant, for example monocotyledons or dicotyledons or gymnosperms, including, but not limited to alfalfa, apple, Arabidopsis, banana, barley, canola, castor bean, chrysanthemum, clover, cocoa, coffee, cotton, cottonseed, corn, crambe, cranberry, cucumber, dendrobium, dioscorea, eucalyptus, fescue, flax, gladiolus, liliacea, linseed, millet, muskmelon, mustard, oat, oil palm, oilseed rape, papaya, peanut, pineapple, ornamental plants, Phaseolus, potato, rapeseed, rice, rye, ryegrass, safflower, sesame, sorghum, soybean, sugarbeet, sugarcane, sunflower, strawberry, tobacco, tomato, turfgrass, wheat and vegetable crops such as lettuce, celery, broccoli, cauliflower, cucurbits; fruit and nut trees, such as apple, pear, peach, orange, grapefruit, lemon, lime, almond, pecan, walnut, hazel; vines, such as grapes (e.g., a vineyard), kiwi, hops; fruit shrubs and brambles, such as raspberry, blackberry, gooseberry; forest trees, such as ash, pine, fir, maple, oak, chestnut, popular; with alfalfa, canola, castor bean, corn, cotton, crambe, flax, linseed, mustard, oil palm, oilseed rape, peanut, potato, rice, safflower, sesame, soybean, sugarbeet, sunflower, tobacco, tomato, and wheat. Plants that can be treated in accordance with the methods of the present invention include any crop plant, for example, forage crop, oilseed crop, grain crop, fruit crop, vegetable crop, fiber crop, spice crop, nut crop, turf crop, sugar crop, beverage crop, and forest crop. In certain instances, the crop plant that is treated in the method is a soybean plant. In other certain instances, the crop plant is wheat. In certain instances, the crop plant is corn. In certain instances, the crop plant is cotton. In certain instances, the crop plant is alfalfa. In certain instances, the crop plant is sugarbeet. In certain instances, the crop plant is rice. In certain instances, the crop plant is potato. In certain instances, the crop plant is tomato.

[0395] In certain instances, the plant is a crop. Examples of such crop plants include, but are not limited to, monocotyledonous and dicotyledonous plants including, but not limited to, fodder or forage legumes, ornamental plants, food crops, trees, or shrubs selected from Acer spp., Allium spp., Amaranthus spp., Ananas comosus, Apium graveolens, Arachis spp, Asparagus officinalis, Beta vulgaris, Brassica spp. (e.g., Brassica napus, Brassica rapa ssp. (canola, oilseed rape, turnip rape), Camellia sinensis, Canna indica, Cannabis saliva, Capsicum spp., Castanea spp., Cichorium endivia, Citrullus lanatus, Citrus spp., Cocos spp., Coffea spp., Coriandrum sativum, Corylus spp., Crataegus spp., Cucurbita spp., Cucumis spp., Daucus carota, Fagus spp., Ficus carica, Fragaria spp., Ginkgo biloba, Glycine spp. (e.g., Glycine max, Soja hispida or Soja max), Gossypium hirsutum, Helianthus spp. (e.g., Helianthus annuus), Hibiscus spp., Hordeum spp. (e.g., Hordeum vulgare), Ipomoea batatas, Juglans spp., Lactuca sativa, Linum usitatissimum, Litchi chinensis, Lotus spp., Luffa acutangula, Lupinus spp., Lycopersicon spp. (e.g., Lycopersicon esculenturn, Lycopersicon lycopersicum, Lycopersicon pyriforme), Malus spp., Medicago sativa, Mentha spp., Miscanthus sinensis, Morus nigra, Musa spp., Nicotiana spp., Olea spp., Oryza spp. (e.g., Oryza sativa, Oryza latifolia), Panicum miliaceum, Panicum virgatum, Passiflora edulis, Petroselinum crispum, Phaseolus spp., Pinus spp., Pistacia vera, Pisum spp., Poa spp., Populus spp., Prunus spp., Pyrus communis, Quercus spp., Raphanus sativus, Rheum rhabarbarum, Ribes spp., Ricinus communis, Rubus spp., Saccharum spp., Salix sp., Sambucus spp., Secale cereale, Sesamum spp., Sinapis spp., Solanum spp. (e.g., Solanum tuberosum, Solanum integrifolium or Solanum lycopersicum), Sorghum bicolor, Sorghum halepense, Spinacia spp., Tamarindus indica, Theobroma cacao, Trifolium spp., Triticosecale rimpaui, Triticum spp. (e.g., Triticum aestivum, Triticum durum, Triticum turgidum, Triticum hybernum, Triticum macha, Triticum sativum or Triticum vulgare), Vaccinium spp., Vicia spp., Vigna spp., Viola odorata, Vitis spp., and Zea mays. In certain embodiments, the crop plant is rice, oilseed rape, canola, soybean, corn (maize), cotton, sugarcane, alfalfa, sorghum, or wheat.

[0396] The plant or plant part for use in the present invention include plants of any stage of plant development. In certain instances, the delivery can occur during the stages of germination, seedling growth, vegetative growth, and reproductive growth. In certain instances, delivery to the plant occurs during vegetative and reproductive growth stages. In some instances, the composition is delivered to pollen of the plant. In some instances, the composition is delivered to a seed of the plant. In some instances, the composition is delivered to a protoplast of the plant. In some instances, the composition is delivered to a tissue of the plant. For example, the composition may be delivered to meristematic tissue of the plant (e.g., apical meristem, lateral meristem, or intercalary meristem). In some instances, the composition is delivered to permanent tissue of the plant (e.g., simple tissues (e.g., parenchyma, collenchyma, or sclerenchyma) or complex permanent tissue (e.g., xylem or phloem)). In some instances, the composition is delivered to a plant embryo. In some instances, the composition is delivered to a plant cell. The stages of vegetative and reproductive growth are also referred to herein as “adult” or “mature” plants.

[0397] In instances where the Gene Writer system is delivered to a plant part, the plant part may be modified by the plant-modifying agent. Alternatively, the Gene Writer system may be distributed to other parts of the plant (e.g., by the plant's circulatory system) that are subsequently modified by the plant-modifying agent.

### Lipid Nanoparticles

[0398] The methods and systems provided by the invention, may employ any suitable carrier or delivery modality, including, in certain embodiments, lipid nanoparticles (LNPs). Lipid nanoparticles, in some embodiments, comprise one or more ionic lipids, such as non-cationic lipids (e.g., neutral or anionic, or zwitterionic lipids); one or more conjugated lipids (such as PEG-conjugated lipids or lipids conjugated to polymers described in Table 5 of WO2019217941; incorporated herein by reference in its entirety); one or more sterols (e.g., cholesterol); and, optionally, one or more targeting molecules (e.g., conjugated receptors, receptor ligands, antibodies); or combinations of the foregoing.

[0399] Lipids that can be used in nanoparticle formations (e.g., lipid nanoparticles) include, for example those described in Table 4 of WO2019217941, which is incorporated by reference—e.g., a lipid-containing nanoparticle can comprise one or more of the lipids in Table 4 of WO2019217941. Lipid nanoparticles can include additional elements, such as polymers, such as the polymers described in Table 5 of WO2019217941, incorporated by reference.

[0400] In some embodiments, conjugated lipids, when present, can include one or more of PEG-diacylglycerol (DAG) (such as 1-(monomethoxy-polyethyleneglycol)-2,3-dimyristoylglycerol (PEG-DMG)), PEG-dialkyloxypropyl (DAA), PEG-phospholipid, PEG-ceramide (Cer), a pegylated phosphatidylethanoloamine (PEG-PE), PEG succinate diacylglycerol (PEGS-DAG) (such as 4-0-(2′,3′-di(tetradecanoyloxy)propyl-1-0-(w-methoxy(polyethoxy)ethyl) butanedioate (PEG-S-DMG)), PEG dialkoxypropylcarbam, N-(carbonyl-methoxypoly ethylene glycol 2000)-1,2-distearoyl-sn-glycero-3-phosphoethanolamine sodium salt, and those described in Table 2 of WO2019051289 (incorporated by reference), and combinations of the foregoing.

[0401] In some embodiments, sterols that can be incorporated into lipid nanoparticles include one or more of cholesterol or cholesterol derivatives, such as those in WO2009/127060 or US2010/0130588, which are incorporated by reference. Additional exemplary sterols include phytosterols, including those described in Eygeris et al (2020), dx.doi.org/10.1021/acs.nanolett.0c01386, incorporated herein by reference.

[0402] In some embodiments, the lipid particle comprises an ionizable lipid, a non-cationic lipid, a conjugated lipid that inhibits aggregation of particles, and a sterol. The amounts of these components can be varied independently and to achieve desired properties. For example, in some embodiments, the lipid nanoparticle comprises an ionizable lipid is in an amount from about 20 mol % to about 90 mol % of the total lipids (in other embodiments it may be 20-70% (mol), 30-60% (mol) or 40-50% (mol); about 50 mol % to about 90 mol % of the total lipid present in the lipid nanoparticle), a non-cationic lipid in an amount from about 5 mol % to about 30 mol % of the total lipids, a conjugated lipid in an amount from about 0.5 mol % to about 20 mol % of the total lipids, and a sterol in an amount from about 20 mol % to about 50 mol % of the total lipids. The ratio of total lipid to nucleic acid (e.g., encoding the Gene Writer or template nucleic acid) can be varied as desired. For example, the total lipid to nucleic acid (mass or weight) ratio can be from about 10:1 to about 30:1.

[0403] In some embodiments, the lipid to nucleic acid ratio (mass/mass ratio; w/w ratio) can be in the range of from about 1:1 to about 25:1, from about 10:1 to about 14:1, from about 3:1 to about 15:1, from about 4:1 to about 10:1, from about 5:1 to about 9:1, or about 6:1 to about 9:1. The amounts of lipids and nucleic acid can be adjusted to provide a desired N/P ratio, for example, N/P ratio of 3, 4, 5, 6, 7, 8, 9, 10 or higher. Generally, the lipid nanoparticle formulation's overall lipid content can range from about 5 mg/ml to about 30 mg/mL.

[0404] Exemplary ionizable lipids that can be used in lipid nanoparticle formulations include, without limitation, those listed in Table 1 of WO2019051289, incorporated herein by reference. Additional exemplary lipids include, without limitation, one or more of the following formulae: X of US2016/0311759; I of US20150376115 or in US2016/0376224; I, II or III of US20160151284; I, IA, II, or IIA of US20170210967; I-c of US20150140070; A of US2013/0178541; I of US2013/0303587 or US2013/0123338; I of US2015/0141678; II, III, IV, or V of US2015/0239926; I of US2017/0119904; I or II of WO2017/117528; A of US2012/0149894; A of US2015/0057373; A of WO2013/116126; A of US2013/0090372; A of US2013/0274523; A of US2013/0274504; A of US2013/0053572; A of WO2013/016058; A of WO2012/162210; I of US2008/042973; I, II, III, or IV of US2012/01287670; I or II of US2014/0200257; I, II, or III of US2015/0203446; I or III of US2015/0005363; I, IA, IB, IC, ID, II, IIA, IIB, IIC, IID, or III-XXIV of US2014/0308304; of US2013/0338210; I, II, III, or IV of WO2009/132131; A of US2012/01011478; I or XXXV of US2012/0027796; XIV or XVII of US2012/0058144; of US2013/0323269; I of US2011/0117125; I, II, or III of US2011/0256175; I, II, III, IV, V, VI, VII, VIII, IX, X, XI, XII of US2012/0202871; I, II, III, IV, V, VI, VII, VIII, X, XII, XIII, XIV, XV, or XVI of US2011/0076335; I or II of US2006/008378; I of US2013/0123338; I or X-A-Y-Z of US2015/0064242; XVI, XVII, or XVIII of US2013/0022649; I, II, or III of US2013/0116307; I, II, or III of US2013/0116307; I or II of US2010/0062967; I-X of US2013/0189351; I of US2014/0039032; V of US2018/0028664; I of US2016/0317458; I of US2013/0195920.

[0405] In some embodiments, the ionizable lipid is MC3 (6Z,9Z,28Z,3 1Z)-heptatriaconta-6,9,28,3 1-tetraen-19-yl-4-(dimethylamino) butanoate (DLin-MC3-DMA or MC3), e.g., as described in Example 9 of WO2019051289A9 (incorporated by reference herein in its entirety). In some embodiments, the ionizable lipid is the lipid ATX-002, e.g., as described in Example 10 of WO2019051289A9 (incorporated by reference herein in its entirety). In some embodiments, the ionizable lipid is (13Z,16Z)-A,A-dimethyl-3-nonyldocosa-13,16-dien-1-amine (Compound 32), e.g., as described in Example 11 of WO2019051289A9 (incorporated by reference herein in its entirety). In some embodiments, the ionizable lipid is Compound 6 or Compound 22, e.g., as described in Example 12 of WO2019051289A9 (incorporated by reference herein in its entirety).

[0406] Exemplary non-cationic lipids include, but are not limited to, distearoyl-sn-glycero-phosphoethanolamine, distearoylphosphatidylcholine (DSPC), dioleoylphosphatidylcholine (DOPC), dipalmitoylphosphatidylcholine (DPPC), dioleoylphosphatidylglycerol (DOPG), dipalmitoylphosphatidylglycerol (DPPG), dioleoyl-phosphatidylethanolamine (DOPE), palmitoyloleoylphosphatidylcholine (POPC), palmitoyloleoylphosphatidylethanolamine (POPE), dioleoyl-phosphatidylethanolamine 4-(N-maleimidomethyl)-cyclohexane-1-carboxylate (DOPE-mal), dipalmitoyl phosphatidyl ethanolamine (DPPE), dimyristoylphosphoethanolamine (DMPE), distearoyl-phosphatidyl-ethanolamine (DSPE), monomethyl-phosphatidylethanolamine (such as 16-O-monomethyl PE), dimethyl-phosphatidylethanolamine (such as 16-O-dimethyl PE), 18-1-trans PE, 1-stearoyl-2-oleoyl-phosphatidyethanolamine (SOPE), hydrogenated soy phosphatidylcholine (HSPC), egg phosphatidylcholine (EPC), dioleoylphosphatidylserine (DOPS), sphingomyelin (SM), dimyristoyl phosphatidylcholine (DMPC), dimyristoyl phosphatidylglycerol (DMPG), distearoylphosphatidylglycerol (DSPG), dierucoylphosphatidylcholine (DEPC), palmitoyloleyolphosphatidylglycerol (POPG), dielaidoyl-phosphatidylethanolamine (DEPE), lecithin, phosphatidylethanolamine, lysolecithin, lysophosphatidylethanolamine, phosphatidylserine, phosphatidylinositol, sphingomyelin, egg sphingomyelin (ESM), cephalin, cardiolipin, phosphatidicacid, cerebrosides, dicetylphosphate, lysophosphatidylcholine, dilinoleoylphosphatidylcholine, or mixtures thereof. It is understood that other diacylphosphatidylcholine and diacylphosphatidylethanolamine phospholipids can also be used. The acyl groups in these lipids are preferably acyl groups derived from fatty acids having C10-C24 carbon chains, e.g., lauroyl, myristoyl, paimitoyl, stearoyl, or oleoyl. Additional exemplary lipids, in certain embodiments, include, without limitation, those described in Kim et al. (2020) dx.doi.org/10.1021/acs.nanolett.0c01386, incorporated herein by reference. Such lipids include, in some embodiments, plant lipids found to improve liver transfection with mRNA (e.g., DGTS).

[0407] Other examples of non-cationic lipids suitable for use in the lipid nanoparticles include, without limitation, nonphosphorous lipids such as, e.g., stearylamine, dodeeylamine, hexadecylamine, acetyl palmitate, glycerol ricinoleate, hexadecyl stereate, isopropyl myristate, amphoteric acrylic polymers, triethanolamine-lauryl sulfate, alkyl-aryl sulfate polyethyloxylated fatty acid amides, dioctadecyl dimethyl ammonium bromide, ceramide, sphingomyelin, and the like. Other non-cationic lipids are described in WO2017/099823 or US patent publication US2018/0028664, the contents of which is incorporated herein by reference in their entirety.

[0408] In some embodiments, the non-cationic lipid is oleic acid or a compound of Formula I, II, or IV of US2018/0028664, incorporated herein by reference in its entirety. The non-cationic lipid can comprise, for example, 0-30% (mol) of the total lipid present in the lipid nanoparticle. In some embodiments, the non-cationic lipid content is 5-20% (mol) or 10-15% (mol) of the total lipid present in the lipid nanoparticle. In embodiments, the molar ratio of ionizable lipid to the neutral lipid ranges from about 2:1 to about 8:1 (e.g., about 2:1, 3:1, 4:1, 5:1, 6:1, 7:1, or 8:1).

[0409] In some embodiments, the lipid nanoparticles do not comprise any phospholipids.

[0410] In some aspects, the lipid nanoparticle can further comprise a component, such as a sterol, to provide membrane integrity. One exemplary sterol that can be used in the lipid nanoparticle is cholesterol and derivatives thereof. Non-limiting examples of cholesterol derivatives include polar analogues such as 5a-choiestanol, 53-coprostanol, choiesteryl-(2-hydroxy)-ethyl ether, choiesteryl-(4′-hydroxy)-butyl ether, and 6-ketocholestanol; non-polar analogues such as 5a-cholestane, cholestenone, 5a-cholestanone, 5p-cholestanone, and cholesteryl decanoate; and mixtures thereof. In some embodiments, the cholesterol derivative is a polar analogue, e.g., choiesteryl-(4′-hydroxy)-butyl ether. Exemplary cholesterol derivatives are described in PCT publication WO2009/127060 and US patent publication US2010/0130588, each of which is incorporated herein by reference in its entirety.

[0411] In some embodiments, the component providing membrane integrity, such as a sterol, can comprise 0-50% (mol) (e.g., 0-10%, 10-20%, 20-30%, 30-40%, or 40-50%) of the total lipid present in the lipid nanoparticle. In some embodiments, such a component is 20-50% (mol) 30-40% (mol) of the total lipid content of the lipid nanoparticle.

[0412] In some embodiments, the lipid nanoparticle can comprise a polyethylene glycol (PEG) or a conjugated lipid molecule. Generally, these are used to inhibit aggregation of lipid nanoparticles and/or provide steric stabilization. Exemplary conjugated lipids include, but are not limited to, PEG-lipid conjugates, polyoxazoline (POZ)-lipid conjugates, polyamide-lipid conjugates (such as ATTA-lipid conjugates), cationic-polymer lipid (CPL) conjugates, and mixtures thereof. In some embodiments, the conjugated lipid molecule is a PEG-lipid conjugate, for example, a (methoxy polyethylene glycol)-conjugated lipid.

[0413] Exemplary PEG-lipid conjugates include, but are not limited to, PEG-diacylglycerol (DAG) (such as 1-(monomethoxy-polyethyleneglycol)-2,3-dimyristoylglycerol (PEG-DMG)), PEG-dialkyloxypropyl (DAA), PEG-phospholipid, PEG-ceramide (Cer), a pegylated phosphatidylethanoloamine (PEG-PE), PEG succinate diacylglycerol (PEGS-DAG) (such as 4-0-(2′,3′-di(tetradecanoyloxy)propyl-1-0-(w-methoxy(polyethoxy)ethyl) butanedioate (PEG-S-DMG)), PEG dialkoxypropylcarbam, N-(carbonyl-methoxypolyethylene glycol 2000)-1,2-distearoyl-sn-glycero-3-phosphoethanolamine sodium salt, or a mixture thereof. Additional exemplary PEG-lipid conjugates are described, for example, in U.S. Pat. Nos. 5,885,613, 6,287,591, US2003/0077829, US2003/0077829, US2005/0175682, US2008/0020058, US2011/0117125, US2010/0130588, US2016/0376224, US2017/0119904, and US/099823, the contents of all of which are incorporated herein by reference in their entirety. In some embodiments, a PEG-lipid is a compound of Formula III, III-a-2, III-b-1, III-b-2, or V of US2018/0028664, the content of which is incorporated herein by reference in its entirety. In some embodiments, a PEG-lipid is of Formula II of US20150376115 or US2016/0376224, the content of both of which is incorporated herein by reference in its entirety. In some embodiments, the PEG-DAA conjugate can be, for example, PEG-dilauryloxypropyl, PEG-dimyristyloxypropyl, PEG-dipalmityloxypropyl, or PEG-distearyloxypropyl. The PEG-lipid can be one or more of PEG-DMG, PEG-dilaurylglycerol, PEG-dipalmitoylglycerol, PEG-disterylglycerol, PEG-dilaurylglycamide, PEG-dimyristylglycamide, PEG-dipalmitoylglycamide, PEG-disterylglycamide, PEG-cholesterol (1-[8′-(Cholest-5-en-3[beta]-oxy)carboxamido-3′,6′-dioxaoctanyl] carbamoyl-[omega]-methyl-poly(ethylene glycol), PEG-DMB (3,4-Ditetradecoxylbenzyl-[omega]-methyl-poly(ethylene glycol) ether), and 1,2-dimyristoyl-sn-glycero-3-phosphoethanolamine-N-[methoxy(polyethylene glycol)-2000]. In some embodiments, the PEG-lipid comprises PEG-DMG, 1,2-dimyristoyl-sn-glycero-3-phosphoethanolamine-N-[methoxy(polyethylene glycol)-2000]. In some embodiments, the PEG-lipid comprises a structure selected from:

[chemical structure]

[0414] In some embodiments, lipids conjugated with a molecule other than a PEG can also be used in place of PEG-lipid. For example, polyoxazoline (POZ)-lipid conjugates, polyamide-lipid conjugates (such as ATTA-lipid conjugates), and cationic-polymer lipid (GPL) conjugates can be used in place of or in addition to the PEG-lipid.

[0415] Exemplary conjugated lipids, i.e., PEG-lipids, (POZ)-lipid conjugates, ATTA-lipid conjugates and cationic polymer-lipids are described in the PCT and LIS patent applications listed in Table 2 of WO2019051289A9, the contents of all of which are incorporated herein by reference in their entirety.

[0416] In some embodiments, the PEG or the conjugated lipid can comprise 0-20% (mol) of the total lipid present in the lipid nanoparticle. In some embodiments, PEG or the conjugated lipid content is 0.5-10% or 2-5% (mol) of the total lipid present in the lipid nanoparticle. Molar ratios of the ionizable lipid, non-cationic-lipid, sterol, and PEG/conjugated lipid can be varied as needed. For example, the lipid particle can comprise 30-70% ionizable lipid by mole or by total weight of the composition, 0-60% cholesterol by mole or by total weight of the composition, 0-30% non-cationic-lipid by mole or by total weight of the composition and 1-10% conjugated lipid by mole or by total weight of the composition. Preferably, the composition comprises 30-40% ionizable lipid by mole or by total weight of the composition, 40-50% cholesterol by mole or by total weight of the composition, and 10-20% non-cationic-lipid by mole or by total weight of the composition. In some other embodiments, the composition is 50-75% ionizable lipid by mole or by total weight of the composition, 20-40% cholesterol by mole or by total weight of the composition, and 5 to 10% non-cationic-lipid, by mole or by total weight of the composition and 1-10% conjugated lipid by mole or by total weight of the composition. The composition may contain 60-70% ionizable lipid by mole or by total weight of the composition, 25-35% cholesterol by mole or by total weight of the composition, and 5-10% non-cationic-lipid by mole or by total weight of the composition. The composition may also contain up to 90% ionizable lipid by mole or by total weight of the composition and 2 to 15% non-cationic lipid by mole or by total weight of the composition. The formulation may also be a lipid nanoparticle formulation, for example comprising 8-30% ionizable lipid by mole or by total weight of the composition, 5-30% non-cationic lipid by mole or by total weight of the composition, and 0-20% cholesterol by mole or by total weight of the composition; 4-25% ionizable lipid by mole or by total weight of the composition, 4-25% non-cationic lipid by mole or by total weight of the composition, 2 to 25% cholesterol by mole or by total weight of the composition, 10 to 35% conjugate lipid by mole or by total weight of the composition, and 5% cholesterol by mole or by total weight of the composition; or 2-30% ionizable lipid by mole or by total weight of the composition, 2-30% non-cationic lipid by mole or by total weight of the composition, 1 to 15% cholesterol by mole or by total weight of the composition, 2 to 35% conjugate lipid by mole or by total weight of the composition, and 1-20% cholesterol by mole or by total weight of the composition; or even up to 90% ionizable lipid by mole or by total weight of the composition and 2-10% non-cationic lipids by mole or by total weight of the composition, or even 100% cationic lipid by mole or by total weight of the composition. In some embodiments, the lipid particle formulation comprises ionizable lipid, phospholipid, cholesterol and a PEG-ylated lipid in a molar ratio of 50:10:38.5:1.5. In some other embodiments, the lipid particle formulation comprises ionizable lipid, cholesterol and a PEG-ylated lipid in a molar ratio of 60:38.5:1.5.

[0417] In some embodiments, the lipid particle comprises ionizable lipid, non-cationic lipid (e.g. phospholipid), a sterol (e.g., cholesterol) and a PEG-ylated lipid, where the molar ratio of lipids ranges from 20 to 70 mole percent for the ionizable lipid, with a target of 40-60, the mole percent of non-cationic lipid ranges from 0 to 30, with a target of 0 to 15, the mole percent of sterol ranges from 20 to 70, with a target of 30 to 50, and the mole percent of PEG-ylated lipid ranges from 1 to 6, with a target of 2 to 5.

[0418] In some embodiments, the lipid particle comprises ionizable lipid/non-cationic-lipid/sterol/conjugated lipid at a molar ratio of 50:10:38.5:1.5.

[0419] In an aspect, the disclosure provides a lipid nanoparticle formulation comprising phospholipids, lecithin, phosphatidylcholine and phosphatidylethanolamine.

[0420] In some embodiments, one or more additional compounds can also be included. Those compounds can be administered separately or the additional compounds can be included in the lipid nanoparticles of the invention. In other words, the lipid nanoparticles can contain other compounds in addition to the nucleic acid or at least a second nucleic acid, different than the first. Without limitations, other additional compounds can be selected from the group consisting of small or large organic or inorganic molecules, monosaccharides, disaccharides, trisaccharides, oligosaccharides, polysaccharides, peptides, proteins, peptide analogs and derivatives thereof, peptidomimetics, nucleic acids, nucleic acid analogs and derivatives, an extract made from biological materials, or any combinations thereof.

[0421] In some embodiments, LNPs are directed to specific tissues by the addition of targeting domains. For example, biological ligands may be displayed on the surface of LNPs to enhance interaction with cells displaying cognate receptors, thus driving association with and cargo delivery to tissues wherein cells express the receptor. In some embodiments, the biological ligand may be a ligand that drives delivery to the liver, e.g., LNPs that display GalNAc result in delivery of nucleic acid cargo to hepatocytes that display asialoglycoprotein receptor (ASGPR). The work of Akinc et al. Mol Ther 18(7):1357-1364 (2010) teaches the conjugation of a trivalent GalNAc ligand to a PEG-lipid (GalNAc-PEG-DSG) to yield LNPs dependent on ASGPR for observable LNP cargo effect (see, e.g., FIG. 6 of Akinc et al. 2010, supra). Other ligand-displaying LNP formulations, e.g., incorporating folate, transferrin, or antibodies, are discussed in WO2017223135, which is incorporated herein by reference in its entirety, in addition to the references used therein, namely Kolhatkar et al., Curr Drug Discov Technol. 2011 8:197-206; Musacchio and Torchilin, Front Biosci. 2011 16:1388-1412; Yu et al., Mol Membr Biol. 2010 27:286-298; Patil et al., Crit Rev Ther Drug Carrier Syst. 2008 25:1-61; Benoit et al., Biomacromolecules. 2011 12:2708-2714; Zhao et al., Expert Opin Drug Deliv. 2008 5:309-319; Akinc et al., Mol Ther. 2010 18:1357-1364; Srinivasan et al., Methods Mol Biol. 2012 820:105-116; Ben-Arie et al., Methods Mol Biol. 2012 757:497-507; Peer 2010 J Control Release. 20:63-68; Peer et al., Proc Natl Acad Sci USA. 2007 104:4095-4100; Kim et al., Methods Mol Biol. 2011 721:339-353; Subramanya et al., Mol Ther. 2010 18:2028-2037; Song et al., Nat Biotechnol. 2005 23:709-717; Peer et al., Science. 2008 319:627-630; and Peer and Lieberman, Gene Ther. 2011 18:1127-1133.

[0422] In some embodiments, LNPs are selected for tissue-specific activity by the addition of a Selective ORgan Targeting (SORT) molecule to a formulation comprising traditional components, such as ionizable cationic lipids, amphipathic phospholipids, cholesterol and poly(ethylene glycol) (PEG) lipids. The teachings of Cheng et al. Nat Nanotechnol 15(4):313-320 (2020) demonstrate that the addition of a supplemental “SORT” component precisely alters the in vivo RNA delivery profile and mediates tissue-specific (e.g., lungs, liver, spleen) gene delivery and editing as a function of the percentage and biophysical property of the SORT molecule.

[0423] In some embodiments, the LNPs comprise biodegradable, ionizable lipids. In some embodiments, the LNPs comprise (9Z,12Z)-3-((4,4-bis(octyloxy)butanoyl)oxy)-2-((((3-(diethylamino)propoxy)carbonyl)oxy)methyl)propyl octadeca-9,12-dienoate, also called 3-((4,4-bis(octyloxy)butanoyl)oxy)-2-((((3-(diethylamino)propoxy)carbonyl)oxy)methyl)propyl (9Z,12Z)-octadeca-9,12-dienoate) or another ionizable lipid. See, e.g, lipids of WO2019/067992, WO/2017/173054, WO2015/095340, and WO2014/136086, as well as references provided therein. In some embodiments, the term cationic and ionizable in the context of LNP lipids is interchangeable, e.g., wherein ionizable lipids are cationic depending on the pH.

[0424] In some embodiments, multiple components of a Gene Writer system may be prepared as a single LNP formulation, e.g., an LNP formulation comprises mRNA encoding for the Gene Writer polypeptide and an RNA template. Ratios of nucleic acid components may be varied in order to maximize the properties of a therapeutic. In some embodiments, the ratio of RNA template to mRNA encoding a Gene Writer polypeptide is about 1:1 to 100:1, e.g., about 1:1 to 20:1, about 20:1 to 40:1, about 40:1 to 60:1, about 60:1 to 80:1, or about 80:1 to 100:1, by molar ratio. In other embodiments, a system of multiple nucleic acids may be prepared by separate formulations, e.g., one LNP formulation comprising a template RNA and a second LNP formulation comprising an mRNA encoding a Gene Writer polypeptide. In some embodiments, the system may comprise more than two nucleic acid components formulated into LNPs. In some embodiments, the system may comprise a protein, e.g., a Gene Writer polypeptide, and a template RNA formulated into at least one LNP formulation.

[0425] In some embodiments, the average LNP diameter of the LNP formulation may be between 10s of nm and 100s of nm, e.g., measured by dynamic light scattering (DLS). In some embodiments, the average LNP diameter of the LNP formulation may be from about 40 nm to about 150 nm, such as about 40 nm, 45 nm, 50 nm, 55 nm, 60 nm, 65 nm, 70 nm, 75 nm, 80 nm, 85 nm, 90 nm, 95 nm, 100 nm, 105 nm, 110 nm, 115 nm, 120 nm, 125 nm, 130 nm, 135 nm, 140 nm, 145 nm, or 150 nm. In some embodiments, the average LNP diameter of the LNP formulation may be from about 50 nm to about 100 nm, from about 50 nm to about 90 nm, from about 50 nm to about 80 nm, from about 50 nm to about 70 nm, from about 50 nm to about 60 nm, from about 60 nm to about 100 nm, from about 60 nm to about 90 nm, from about 60 nm to about 80 nm, from about 60 nm to about 70 nm, from about 70 nm to about 100 nm, from about 70 nm to about 90 nm, from about 70 nm to about 80 nm, from about 80 nm to about 100 nm, from about 80 nm to about 90 nm, or from about 90 nm to about 100 nm. In some embodiments, the average LNP diameter of the LNP formulation may be from about 70 nm to about 100 nm. In a particular embodiment, the average LNP diameter of the LNP formulation may be about 80 nm. In some embodiments, the average LNP diameter of the LNP formulation may be about 100 nm. In some embodiments, the average LNP diameter of the LNP formulation ranges from about 1 mm to about 500 mm, from about 5 mm to about 200 mm, from about 10 mm to about 100 mm, from about 20 mm to about 80 mm, from about 25 mm to about 60 mm, from about 30 mm to about 55 mm, from about 35 mm to about 50 mm, or from about 38 mm to about 42 mm.

[0426] A LNP may, in some instances, be relatively homogenous. A polydispersity index may be used to indicate the homogeneity of a LNP, e.g., the particle size distribution of the lipid nanoparticles. A small (e.g., less than 0.3) polydispersity index generally indicates a narrow particle size distribution. A LNP may have a polydispersity index from about 0 to about 0.25, such as 0.01, 0.02, 0.03, 0.04, 0.05, 0.06, 0.07, 0.08, 0.09, 0.10, 0.11, 0.12, 0.13, 0.14, 0.15, 0.16, 0.17, 0.18, 0.19, 0.20, 0.21, 0.22, 0.23, 0.24, or 0.25. In some embodiments, the polydispersity index of a LNP may be from about 0.10 to about 0.20.

[0427] The zeta potential of a LNP may be used to indicate the electrokinetic potential of the composition. In some embodiments, the zeta potential may describe the surface charge of a LNP. Lipid nanoparticles with relatively low charges, positive or negative, are generally desirable, as more highly charged species may interact undesirably with cells, tissues, and other elements in the body. In some embodiments, the zeta potential of a LNP may be from about −10 mV to about +20 mV, from about −10 mV to about +15 mV, from about −10 mV to about +10 mV, from about −10 mV to about +5 mV, from about −10 mV to about 0 mV, from about −10 mV to about −5 mV, from about −5 mV to about +20 mV, from about −5 mV to about +15 mV, from about −5 mV to about +10 mV, from about −5 mV to about +5 mV, from about −5 mV to about 0 mV, from about 0 mV to about +20 mV, from about 0 mV to about +15 mV, from about 0 mV to about +10 mV, from about 0 mV to about +5 mV, from about +5 mV to about +20 mV, from about +5 mV to about +15 mV, or from about +5 mV to about +10 mV.

[0428] The efficiency of encapsulation of a protein and/or nucleic acid, e.g., Gene Writer polypeptide or mRNA encoding the polypeptide, describes the amount of protein and/or nucleic acid that is encapsulated or otherwise associated with a LNP after preparation, relative to the initial amount provided. The encapsulation efficiency is desirably high (e.g., close to 100%). The encapsulation efficiency may be measured, for example, by comparing the amount of protein or nucleic acid in a solution containing the lipid nanoparticle before and after breaking up the lipid nanoparticle with one or more organic solvents or detergents. An anion exchange resin may be used to measure the amount of free protein or nucleic acid (e.g., RNA) in a solution. Fluorescence may be used to measure the amount of free protein and/or nucleic acid (e.g., RNA) in a solution. For the lipid nanoparticles described herein, the encapsulation efficiency of a protein and/or nucleic acid may be at least 50%, for example 50%, 55%, 60%, 65%, 70%, 75%, 80%, 85%, 90%, 91%, 92%, 93%, 94%, 95%, 96%, 97%, 98%, 99%, or 100%. In some embodiments, the encapsulation efficiency may be at least 80%. In some embodiments, the encapsulation efficiency may be at least 90%. In some embodiments, the encapsulation efficiency may be at least 95%.

[0429] A LNP may optionally comprise one or more coatings. In some embodiments, a LNP may be formulated in a capsule, film, or table having a coating. A capsule, film, or tablet including a composition described herein may have any useful size, tensile strength, hardness or density.

[0430] Additional exemplary lipids, formulations, methods, and characterization of LNPs are taught by WO2020061457, which is incorporated herein by reference in its entirety.

[0431] In some embodiments, in vitro or ex vivo cell lipofections are performed using Lipofectamine MessengerMax (Thermo Fisher) or TranslT-mRNA Transfection Reagent (Minis Bio). In certain embodiments, LNPs are formulated using the GenVoy_ILM ionizable lipid mix (Precision NanoSystems). In certain embodiments, LNPs are formulated using 2,2-dilinoleyl-4-dimethylaminoethyl-[1,3]-dioxolane (DLin-KC2-DMA) or dilinoleylmethyl-4-dimethylaminobutyrate (DLin-MC3-DMA or MC3), the formulation and in vivo use of which are taught in Jayaraman et al. Angew Chem Int Ed Engl 51(34):8529-8533 (2012), incorporated herein by reference in its entirety.

[0432] LNP formulations optimized for the delivery of CRISPR-Cas systems, e.g., Cas9-gRNA RNP, gRNA, Cas9 mRNA, are described in WO2019067992 and WO2019067910, both incorporated by reference.

[0433] Additional specific LNP formulations useful for delivery of nucleic acids are described in U.S. Pat. Nos. 8,158,601 and 8,168,775, both incorporated by reference, which include formulations used in patisiran, sold under the name ONPATTRO.

[0434] Exemplary dosing of Gene Writer LNP may include about 0.1, 0.25, 0.3, 0.5, 1, 2, 3, 4, 5, 6, 8, 10, or 100 mg/kg (RNA). Exemplary dosing of AAV comprising a nucleic acid encoding one or more components of the system may include an MOI of about 10¹¹, 10¹², 10¹³, and 10¹⁴ vg/kg.

[0435] In some embodiments, a lipid nanoparticle (or a formulation comprising lipid nanoparticles) lacks reactive impurities (e.g., aldehydes or ketones), or comprises less than a preselected level of reactive impurities (e.g., aldehydes or ketones). While not wishing to be bound by theory, in some embodiments, a lipid reagent is used to make a lipid nanoparticle formulation, and the lipid reagent may comprise a contaminating reactive impurity (e.g., an aldehyde or ketone). A lipid regent may be selected for manufacturing based on having less than a preselected level of reactive impurities (e.g., aldehydes or ketones). Without wishing to be bound by theory, in some embodiments, aldehydes can cause modification and damage of RNA, e.g., cross-linking between bases and/or covalently conjugating lipid to RNA (e.g., forming lipid-RNA adducts). This may, in some instances, lead to failure of a reverse transcriptase reaction and/or incorporation of inappropriate bases, e.g., at the site(s) of lesion(s), e.g., a mutation in a newly synthesized target DNA.

[0436] In some embodiments, a lipid nanoparticle formulation is produced using a lipid reagent comprising less than 5%, 4%, 3%, 2%, 1%, 0.9%, 0.8%, 0.7%, 0.6%, 0.5%, 0.4%, 0.3%, 0.2%, or 0.1% total reactive impurity (e.g., aldehyde) content. In some embodiments, a lipid nanoparticle formulation is produced using a lipid reagent comprising less than 5%, 4%, 3%, 2%, 1%, 0.9%, 0.8%, 0.7%, 0.6%, 0.5%, 0.4%, 0.3%, 0.2%, or 0.1% of any single reactive impurity (e.g., aldehyde) species. In some embodiments, a lipid nanoparticle formulation is produced using a lipid reagent comprising: (i) less than 5%, 4%, 3%, 2%, 1%, 0.9%, 0.8%, 0.7%, 0.6%, 0.5%, 0.4%, 0.3%, 0.2%, or 0.1% total reactive impurity (e.g., aldehyde) content; and (ii) less than 5%, 4%, 3%, 2%, 1%, 0.9%, 0.8%, 0.7%, 0.6%, 0.5%, 0.4%, 0.3%, 0.2%, or 0.1% of any single reactive impurity (e.g., aldehyde) species. In some embodiments, the lipid nanoparticle formulation is produced using a plurality of lipid reagents, and each lipid reagent of the plurality independently meets one or more criterion described in this paragraph. In some embodiments, each lipid reagent of the plurality meets the same criterion, e.g., a criterion of this paragraph.

[0437] In some embodiments, the lipid nanoparticle formulation comprises less than 5%, 4%, 3%, 2%, 1%, 0.9%, 0.8%, 0.7%, 0.6%, 0.5%, 0.4%, 0.3%, 0.2%, or 0.1% total reactive impurity (e.g., aldehyde) content. In some embodiments, the lipid nanoparticle formulation comprises less than 5%, 4%, 3%, 2%, 1%, 0.9%, 0.8%, 0.7%, 0.6%, 0.5%, 0.4%, 0.3%, 0.2%, or 0.1% of any single reactive impurity (e.g., aldehyde) species. In some embodiments, the lipid nanoparticle formulation comprises: (i) less than 5%, 4%, 3%, 2%, 1%, 0.9%, 0.8%, 0.7%, 0.6%, 0.5%, 0.4%, 0.3%, 0.2%, or 0.1% total reactive impurity (e.g., aldehyde) content; and (ii) less than 5%, 4%, 3%, 2%, 1%, 0.9%, 0.8%, 0.7%, 0.6%, 0.5%, 0.4%, 0.3%, 0.2%, or 0.1% of any single reactive impurity (e.g., aldehyde) species.

[0438] In some embodiments, one or more, or optionally all, of the lipid reagents used for a lipid nanoparticle as described herein or a formulation thereof comprise less than 5%, 4%, 3%, 2%, 1%, 0.9%, 0.8%, 0.7%, 0.6%, 0.5%, 0.4%, 0.3%, 0.2%, or 0.1% total reactive impurity (e.g., aldehyde) content. In some embodiments, one or more, or optionally all, of the lipid reagents used for a lipid nanoparticle as described herein or a formulation thereof comprise less than 5%, 4%, 3%, 2%, 1%, 0.9%, 0.8%, 0.7%, 0.6%, 0.5%, 0.4%, 0.3%, 0.2%, or 0.1% of any single reactive impurity (e.g., aldehyde) species. In some embodiments, one or more, or optionally all, of the lipid reagents used for a lipid nanoparticle as described herein or a formulation thereof comprise: (i) less than 5%, 4%, 3%, 2%, 1%, 0.9%, 0.8%, 0.7%, 0.6%, 0.5%, 0.4%, 0.3%, 0.2%, or 0.1% total reactive impurity (e.g., aldehyde) content; and (ii) less than 5%, 4%, 3%, 2%, 1%, 0.9%, 0.8%, 0.7%, 0.6%, 0.5%, 0.4%, 0.3%, 0.2%, or 0.1% of any single reactive impurity (e.g., aldehyde) species.

[0439] In some embodiments, total aldehyde content and/or quantity of any single reactive impurity (e.g., aldehyde) species is determined by liquid chromatography (LC), e.g., coupled with tandem mass spectrometry (MS/MS), e.g., according to the method described in Example 26. In some embodiments, reactive impurity (e.g., aldehyde) content and/or quantity of reactive impurity (e.g., aldehyde) species is determined by detecting one or more chemical modifications of a nucleic acid molecule (e.g., an RNA molecule, e.g., as described herein) associated with the presence of reactive impurities (e.g., aldehydes), e.g., in the lipid reagents. In some embodiments, reactive impurity (e.g., aldehyde) content and/or quantity of reactive impurity (e.g., aldehyde) species is determined by detecting one or more chemical modifications of a nucleotide or nucleoside (e.g., a ribonucleotide or ribonucleoside, e.g., comprised in or isolated from a template nucleic acid, e.g., as described herein) associated with the presence of reactive impurities (e.g., aldehydes), e.g., in the lipid reagents, e.g., as described in Example 27. In embodiments, chemical modifications of a nucleic acid molecule, nucleotide, or nucleoside are detected by determining the presence of one or more modified nucleotides or nucleosides, e.g., using LC-MS/MS analysis, e.g., as described in Example 27.

[0440] In some embodiments, a nucleic acid (e.g., RNA) described herein (e.g., a template nucleic acid or a nucleic acid encoding a GeneWriter) does not comprise an aldehyde modification, or comprises less than a preselected amount of aldehyde modifications. In some embodiments, on average, a nucleic acid has less than 50, 20, 10, 5, 2, or 1 aldehyde modifications per 1000 nucleotides, e.g., wherein a single cross-linking of two nucleotides is a single aldehyde modification. In some embodiments, the aldehyde modification is an RNA adduct (e.g., a lipid-RNA adduct). In some embodiments, the aldehyde-modified nucleotide is cross-linking between bases. In some embodiments, a nucleic acid (e.g., RNA) described herein comprises less than 50, 20, 10, 5, 2, or 1 cross-links between nucleotide.

[0441] All publications, patent applications, patents, and other publications and references (e.g., sequence database reference numbers) cited herein are incorporated by reference in their entirety. For example, all GenBank, Unigene, and Entrez sequences referred to herein, e.g., in any Table herein, are incorporated by reference. Unless otherwise specified, the sequence accession numbers specified herein, including in any Table herein, refer to the database entries current as of Jul. 19, 2019. When one gene or protein references a plurality of sequence accession numbers, all of the sequence variants are encompassed.

### EXAMPLES

[0442] The invention is further illustrated by the following examples. The examples are provided for illustrative purposes only and are not to be construed as limiting the scope or content of the invention in any way.

### Example 1: Delivery of a Gene Writer™ System to Mammalian Cells

[0443] This example describes a Gene Writer™ genome editing system delivered to a mammalian cell for site-specific insertion of exogenous DNA into a mammalian cell genome.

[0444] In this example, the polypeptide component of the Gene Writer™ system is a recombinase protein selected from Table 3A, 3B, or 3C, and the template DNA component is a plasmid DNA that comprises a target recombination site, e.g., a recognition sequence occurring within a nucleotide sequence in the LeftRegion or RightRegion columns in a corresponding row of Table 2A, 2B, or 2C.

[0445] HEK293T cells are transfected with the following test agents:
[0446] 1. Scrambled DNA control
[0447] 2. DNA coding for the polypeptide described above
[0448] 3. Template DNA described above
[0449] 4. Combination of 2 and 3

[0450] After transfection, HEK293T cells are cultured for at least 4 days and then assayed for site-specific genome editing. Genomic DNA is isolated from each group of HEK293 cells. PCR is conducted with primers that flank the appropriate sequence or genomic locus. The PCR product is run on an agarose gel to measure the length of the amplified DNA.

[0451] A PCR product of the expected length, indicative of a successful Gene Writing™ genome editing event that inserts the DNA plasmid template into the target genome, is observed only in cells that were transfected with the complete Gene Writer™ system of group 4 above.

### Example 2: Targeted Delivery of a Gene Expression Unit into Mammalian Cells Using a Gene Writer™ System

[0452] This example describes the making and using of a Gene Writer genome editor to insert a heterologous gene expression unit into the mammalian genome.

[0453] In this example, a recombinase protein is selected from Table 3A, 3B, or 3C. The recombinase protein targets an appropriate genomic copy of a recognition sequence of the recombinase polypeptide for DNA integration. The template DNA component is a plasmid DNA that comprises a target recombination site (a recognition sequence occurring within a nucleotide sequence in the LeftRegion or RightRegion columns of the corresponding row of Table 2A, 2B, or 2C) and gene expression unit. A gene expression unit comprises at least one regulatory sequence operably linked to at least one coding sequence. In this example, the regulatory sequences include the CMV promoter and enhancer, an enhanced translation element, and a WPRE. The coding sequence is the GFP open reading frame.

[0454] HEK293 cells are transfected with the following test agents:

1. Scrambled DNA control
2. DNA coding for the polypeptide described above
3. Template DNA described above

### 4. Combination of 2 and 3

[0455] After transfection, HEK293 cells are cultured for at least 4 days and assayed for site-specific Gene Writing genome editing. Genomic DNA is isolated from the HEK293 cells and PCR is conducted with primers that flank the target integration site in the genome. The PCR product is run on an agarose gel to measure the length of DNA. A PCR product of the expected length, indicative of a successful Gene Writing™ genome editing event, is detected in cells transfected with the test agent of group 4 (complete Gene Writer™ system).

[0456] The transfected cells are cultured for a further 10 days, and after multiple cell culture passages are assayed for GFP expression via flow cytometry. The percent of cells that are GFP positive from each cell population are calculated. GFP positive cells are detected in the population of HEK293 cells that were transfected with group 4 test agent, demonstrating that a gene expression unit added into the mammalian cell genome via Gene Writing genome editing is expressed.

### Example 3: Targeted Delivery of a Splice Acceptor Unit into Mammalian Cells Using a Gene Writer™ System

[0457] This example describes the making and use of a Gene Writing genome editing system to add a heterologous sequence into an intronic region to act as a splice acceptor for an upstream exon. Splicing into the first intron a new exon containing a splice acceptor site at the 5′ end and a polyA tail at the 3′ end will result in a mature mRNA containing the first natural exon of the natural locus spliced to the new exon.

[0458] In this example, a recombinase protein selected from Table 3A, 3B, or 3C. The recombinase protein targets a compatible recognition site in a genome, e.g., a HEK293 genome, for DNA integration. The template DNA codes for GFP with a splice acceptor site immediately 5′ to the first amino acid of mature GFP (the start codon is removed) and a 3′ polyA tail downstream of the stop codon.

[0459] HEK293 cells are transfected with the following test agents:

1. Scrambled DNA control
2. DNA coding for the polypeptide described above
3. Template DNA described above

### 4. Combination of 2 and 3

[0460] After transfection, HEK293 cells are cultured for at least 4 days and assayed for site-specific Gene Writing genome editing and appropriate mRNA processing. Genomic DNA is isolated from the HEK293 cells. Reverse transcription-PCR is conducted to measure the mature mRNA containing the first natural exon of the target locus and the new exon. The RT-PCR reaction is conducted with forward primers that bind to the target locus (e.g., the first natural exon of the target locus) and with reverse primers that bind to GFP. The RT-PCR product is run on an agarose gel to measure the length of DNA. A PCR product of the expected length is detected in cells transfected with the test agent of group 4, indicative of a successful Gene Writing genome editing event and a successful splice event. This result would demonstrate that a Gene Writing genome editing system can add a heterologous sequence encoding a gene into a target locus, e.g., intronic region, to act as a splice acceptor for the upstream exon.

[0461] The transfected cells are cultured for a further 10 days and, after multiple cell culture passages, are assayed for GFP expression via flow cytometry. The percent of cells that are GFP positive from each cell population are calculated. GFP positive cells are detected in the population of HEK293 cells that were transfected with group 4 test agent, demonstrating that a gene expression unit added into the mammalian cell genome via Gene Writing genome editing is expressed.

### Example 4: Specificity of Gene Writing in Mammalian Cells

[0462] This example describes a Gene Writer™ genome system delivered to a mammalian cell for site-specific insertion of exogenous DNA into a mammalian cell genome and a measurement of the specificity of the site-specific insertion.

[0463] In this example, Gene Writing is conducted in HEK293T cells as described in any of the preceding Examples. After transfection, HEK293T cells are cultured for at least 4 days and then assayed for site-specific genome editing. Linear amplification PCR is conducted as described in Schmidt et al. Nature Methods 4, 1051-1057 (2007) using a forward primer specific to the template DNA that will amplify adjacent genomic DNA. Amplified PCR products are then sequenced using next generation sequencing technology on a MiSeq instrument. The MiSeq reads are mapped to the HEK293T genome to identify integration sites in the genome.

[0464] The percent of LAM-PCR sequencing reads that map to the target genomic site is the specificity of the Gene Writer.

[0465] The number of total genomic sites that LAM-PCR sequencing reads map to is the number of total integration sites.

### Example 5: Efficiency of Gene Writing in Mammalian Cells

[0466] This example describes Gene Writer™ genome system delivered to a mammalian cell for site-specific insertion of exogenous DNA into a mammalian cell genome, and a measurement of the efficiency of Gene Writing.

[0467] In this example, Gene Writing is conducted in HEK293T cells as described in any of the preceding Examples. After transfection, HEK293T cells are cultured for at least 4 days and then assayed for site-specific genome editing. Digital droplet PCR is conducted as described in Lin et al., Human Gene Therapy Methods 27(5), 197-208, 2016. A forward primer binds to the template DNA and a reverse primer binds on one side of the appropriate genomic integration site, thus a PCR amplification is only expected upon integration of target DNA. A probe to the target site containing a FAM fluorophore and is used to measure the number of copies of the target DNA in the genome. Primers and HEX-fluorophore probe specific to a housekeeping gene (e.g. RPP30) are used to measure the copies of genomic DNA per droplet.

[0468] The copy number of target DNA per droplet normalized to the copy number of house keeping DNA per droplet is the efficiency of the Gene Writer.

### Example 6: Determination of Copy Number of a Recombinase in a Cell

[0469] The following example describes the absolute quantification of a recombinase on a per cell basis. This measurement is performed using the AQUA mass spectrometry based methods, e.g., as accessible at the following uniform resource locator (URL):https://www.sciencedirect.com/science/article/pii/S1046202304002087?via %3Dihub

[0470] Following delivery of the recombinase and DNA template to the cells, the recombination is allowed to proceed for 24 hours after which the cells are quantified and then quantified by this MS method. This method involves two stages.

[0471] In the first stage, the amino acid sequence of the recombinase is examined, and a representative tryptic peptide is selected for analysis. An AQUA peptide is then synthesized with an amino acid sequence that exactly mimics the corresponding native peptide produced during proteolysis. However, stable isotopes are incorporated at one residue to allow the mass spectrometer to differentiate between the analyte and internal standard. The synthetic peptide and the native peptide share the same physicochemical properties including chromatographic co-elution, ionization efficiency, and relative distributions of fragment ions, but are differentially detected in a mass spectrometer due to their mass difference. The synthetic peptide is next analyzed by LC-MS/MS techniques to confirm the retention time of the peptide, determine fragment ion intensities, and select an ion for SRM analysis. In such an SRM experiment, a triple quadrupole mass spectrometer is directed to select the expected precursor ion in the first scanning quadrupole, or Q1. Only ions with this one mass-to-charge (m/z) ratio are directed into the collision cell (Q2) to be fragmented. The resulting product ions are passed to the third quadrupole (Q3), where the m/z ratio for single fragment ion is monitored across a narrow m/z window.

[0472] The second stage involves quantification of the recombinase from cell or tissue lysates. A quantified number of cells or mass of tissue is used to initiate the reaction and is used to normalize the quantification to a per cell basis. Cell lysates are separated prior to proteolysis to increase the dynamic range of the assay via SDS-PAGE, followed by excision of the region of the gel where the recombinase migrates. In-gel digestion is performed to obtain native tryptic peptides. In-gel digestion is performed in the presence of the AQUA peptide, which is added to the gel pieces during the digestion process. Following proteolysis, the complex peptide mixture, containing both heavy and light peptides, is analyzed in an LC-SRM experiment using parameters determined during the first stage.

[0473] The results of the mass spectrometry-based quantification is converted to a number of proteins loaded to determine the number of recombinases per cell.

### Example 7: Copy Number of DNA Inside Cell

### Q-FISH

[0474] The following example describes the quantification of delivered DNA template on a per cell basis. In this example the DNA that the recombinase is integrating contains a DNA-probe binding site. Following delivery of the recombinase and DNA template to the cells, the recombination is allowed to proceed for 24 hours, after which the cells are quantified and are prepared for quantitative fluorescence in situ hybridization (Q-FISH). Q-FISH is conducted using FISH Tag DNA Orange Kit, with Alex Fluor 555 dye (ThermoFisher catalog number F32948). Briefly, a DNA probe that binds to the DNA-probe binding site on the DNA template is generated through a procedure of nick translation, dye labeling, and purification as described in the Kit manual. The cells are then labeled with the DNA probe as described in the Kit manual. The cells are imaged on a Zeiss LSM 710 confocal microscope with a 63×oil immersion objective while maintained at 37C and 5% CO2. The DNA probe is subjected to 555 nm laser excitation to stimulate Alexa Flour. A MATLAB script is written to measure the Alex Fluor intensity relative to a standard generated with known quantities of DNA. Using this method, the amount of template DNA delivered to a cell is determined.

qPCR

[0475] The following example describes the quantification of delivered DNA template on a per cell basis. In this example the DNA that the recombinase is integrating contains a DNA-probe binding site. Following delivery of the recombinase and DNA template to the cells, the recombination is allowed to proceed for 24 hours after which the cells are quantified, and cells are prepared for quantitative PCR (qPCR). qPCR is conducted using standard kits for this protocol, such as the ThermoFisher TaqMan product (https://www.thermofisher.com/us/en/home/life-science/per/real-time-per/real-time-per-assays-search.html). Briefly, primers are designed that specifically amplify a region of the delivered template DNA as well as probes for the specific amplicon. A standard curve is generated by using a serial dilution of quantified pure template DNA to correlate threshold Ct numbers to number of DNA templates. The DNA is then extracted from the cells being analyzed and input into the qPCR reaction along with all additional components per the manufacturer's directions. The samples are than analyzed on an appropriate qPCR machine to determine the Ct number, which is then mapped to the standard curve for absolute quantification. Using this method, the amount of template DNA delivered to a cell is determined.

### Example 8: Intracellular Ratio of DNA:Recombinase

[0476] The following example describes the determination of the ratio of recombinase protein to template DNA cell in the target cells. Following delivery of the recombinase and DNA template to the cells, the recombination is allowed to proceed for 24 hours after which the cells are quantified, and cells are prepared quantification of the recombinase and of the template DNA as outlined in the above examples. These two values (recombinase per cell and template DNA per cell) are then divided (recombinase per cell/template DNA per cell) to determine the bulk average ratio of these quantities. Using this method, the ratio of recombinase to template DNA delivered to a cell is determined.

### Example 9: Activity in Presence of DNA-Damage Response Inhibiting Agents—Activity in Presence of NHEJ Inhibitor

[0477] The following example describes the assaying of activity of the recombinase protein in the presence of inhibitors of non-homologous end joining to highlight the lack of dependence on the expression of the proteins involved in these pathways for activity of the recombinase. Briefly, the assay outlined to determine efficiency of recombinase activity outlined in the example above is performed. However, in this case two separate experiments are performed.

[0478] In experiment 1, 24 hours after delivery of the recombinase and Template DNA, 1 μM of the NHEJ inhibitor Scr7 (https://www.sigmaaldrich.com/catalog/product/sigma/sml1546?lang=en&region=US) is added to the cell growth media to inhibit this pathway. All other elements of the protocol are identical.

[0479] In experiment 2, the cells are manipulated identically as in experiment 1 but no inhibitor is added to the media. Both experiments are analyzed for efficiency per the example above and the % inhibited activity relative to uninhibited activity is determined.

### Example 10: Activity in Presence of DNA-Damage Response Inhibiting Agents—Activity in Presence of HDR Inhibitor

[0480] The following example describes the assaying of activity of the recombinase protein in the presence of inhibitors of homologous recombination to highlight the lack of dependence on the expression of the proteins involved in these pathways for activity of the recombinase. Briefly, the assay outlined to determine efficiency of recombinase activity outlined in the example above is performed. However, in this case, two separate experiments are performed.

[0481] In experiment 1: 24 hours after delivery of the recombinase and Template DNA, 1 μM of the HR inhibitor B02 (https://www.selleckchem.com/products/b02.html) is added to the cell growth media to inhibit this pathway. All other elements of the protocol are identical.

[0482] In experiment 2: the cells are manipulated identically as in experiment 1 but no inhibitor is added to the media. Both experiments are analyzed for efficiency per the example above and the % inhibited activity relative to uninhibited activity is determined.

### Example 11: Percentage of Nuclear Versus Cytoplasmic Recombinase

[0483] The following example describes the determination of the ratio of recombinase protein in the nucleus vs the cytoplasm of target cells. 12 hours following delivery of the recombinase and DNA template to the cells as described herein, the cells are quantified and prepared for analysis. The cells are split into nuclear and cytoplasmic fractions using the following standard kits, following manufacturer directions: NE-PER Nuclear and Cytoplasmic Extraction by ThermoFisher. Both the cytoplasmic and nuclear fractions are kept and then put through the mass spec based recombinase quantification assay outlined in the example above. Using this method, the ratio of nuclear recombinase to cytoplasmic recombinase in the cells is determined.

### Example 12: Delivery to Plant Cells

[0484] This example illustrates a method of delivering at least one recombinase to a plant cell wherein the plant cell is located in a plant or plant part. More specifically, this example describes delivery of a Gene Writing recombinase and its template DNA to a non-epidermal plant cell (i.e., a cell in a soybean embryo), in order to edit an endogenous plant gene (i.e., phytoene desaturase, PDS) in germline cells of excised soybean embryos. This example describes delivery of polynucleotides encoding the delivered transgene through multiple barriers (e.g., multiple cell layers, seed coat, cell walls, plasma membrane) directly into soybean germline cells, resulting in a heritable alteration of the target nucleotide sequence, PDS. The methods described do not employ the common techniques of bacterially mediated transformation (e.g., by Agrobacterium sp.) or biolistics.

[0485] Plasmids are designed for delivery of recombinase and a single template DNA targeting the endogenous phytoene desaturase (PDS) in soybean (Glycine max). It will be apparent to one skilled in the art that analogous plasmids are easily designed to encode other recombinases and template DNA sequences, optionally including different elements (e. g., different promoters, terminators, selectable or detectable markers, a cell-penetrating peptide, a nuclear localization signal, a chloroplast transit peptide, or a mitochondrial targeting peptide, etc.), and used in a similar manner.

[0486] In a first series of experiments, these vectors are delivered to non-epidermal plant cells in soybean embryos using combinations of delivery agents and electroporation. Mature, dry soybean seeds (cv. Williams 82) are surface-sterilized as follows. Dry soybean seeds are held for 4 hours in an enclosed chamber holding a beaker containing 100 milliliters 5% sodium hypochlorite solution to which 4 milliliters hydrochloric acid are freshly added. Seeds remain desiccated after this sterilization treatment. The sterilized seeds are split into 2 halves by manual application of a razor blade and the embryos are manually separated from the cotyledons. Each test or control treatment is carried out on 20 excised embryos. The following series of experiments is then performed.

Experiment 1: A delivery solution containing the vectors (100 nanograms per microliter of each plasmid) in 0.01% CTAB (cetyltrimethylammonium bromide, a quaternary ammonium surfactant) in sterile-filtered milliQ water is prepared. Each solution is chilled to 4 degrees Celsius and 500 microliters are added directly to the embryos, which are then immediately placed on ice in a vacuum chamber and subjected to a negative pressure (2×10″3 millibar) treatment for 15 minutes. Following the chilling/negative pressure treatments, the embryos are treated with electric current using a BTX-Harvard ECM-830 electroporation device set with the following parameters: 50V, 25 millisecond pulse length, 75 millisecond pulse interval for 99 pulses.
Experiment 2: conditions identical to Experiment 1, except that the initial contacting with delivery solution and negative pressure treatments are carried out at room temperature.
Experiment 3: conditions identical to Experiment 1, except that the delivery solution is prepared without CTAB but includes 0.1% Silwet L-77™ (CAS Number 27306-78-1, available from Momentive Performance Materials, Albany, N.Y). Half (10 of 20) of the embryos receiving each treatment undergo electroporation, and the other half of the embryos do not.
Experiment 4: conditions identical to Experiment 3, except that several delivery solutions are prepared, where each further includes 20 micrograms/milliliter of one single-walled carbon nanotube preparation selected from those with catalogue numbers 704113, 750530, 724777, and 805033, all obtainable from Sigma-Aldrich, St. Louis, Mo. Half (10 of 20) of the embryos receiving each treatment undergo electroporation, and the other half of the embryos do not.
Experiment 5: conditions identical to Experiment 3, except that the delivery solution further includes 20 micrograms/milliliter of triethoxylpropylaminosilane-functionalized silica nanoparticles (catalogue number 791334, Sigma-Aldrich, St. Louis, Mo. Half (10 of 20) of the embryos receiving each treatment undergo electroporation, and the other half of the embryos do not.
Experiment 6: conditions identical to Experiment 3, except that the delivery solution further includes 9 micrograms/milliliter branched polyethylenimine, molecular weight −25,000 (CAS Number 9002-98-6, catalogue number 408727, Sigma-Aldrich, St. Louis, Mo.) or 9 micro grams/milliliter branched polyethylenimine, molecular weight −800 (CAS Number 25987-06-8, catalogue number 408719, Sigma-Aldrich, St. Louis, Mo.). Half (10 of 20) of the embryos receiving each treatment undergo electroporation, and the other half of the embryos do not.
Experiment 7: conditions identical to Experiment 3, except that the delivery solution further includes 20% v/v dimethylsulf oxide (DMSO, catalogue number D4540, Sigma-Aldrich, St. Louis, Mo.). Half (10 of 20) of the embryos receiving each treatment undergo electroporation, and the other half of the embryos do not.
Experiment 8: conditions identical to Experiment 3, except that the delivery solution further contains 50 micromolar nono-arginine (RRRRRRRRR, SEQ ID NO: 3477). Half (10 of 20) of the embryos receiving each treatment undergo electroporation, and the other half of the embryos do not.
Experiment 9: conditions identical to Experiment 3, except that following the vacuum treatment, the embryos and treatment solutions are transferred to microcentrifuge tubes and centrifuged 2, 5, 10, or 20 minutes at 4000×g. Half (10 of 20) of the embryos receiving each treatment undergo electroporation, and the other half of the embryos do not.
Experiment 10: conditions identical to Experiment 3, except that following the vacuum treatment, the embryos and treatment solutions are transferred to microcentrifuge tubes and centrifuged 2, 5, 10, or 20 minutes at 4000×g.
Experiment 11: conditions identical to Experiment 4, except that following the vacuum treatment, the embryos and treatment solutions are transferred to microcentrifuge tubes and centrifuged 2, 5, 10, or 20 minutes at 4000×g.
Experiment 12: conditions identical to Experiment 5, except that following the vacuum treatment, the embryos and treatment solutions are transferred to microcentrifuge tubes and centrifuged 2, 5, 10, or 20 minutes at 4000×g.

[0487] After the delivery treatment, each treatment group of embryos is washed 5 times with sterile water, transferred to a petri dish containing ½ MS solid medium (2.165 g Murashige and Skoog medium salts, catalogue number MSP0501, Caisson Laboratories, Smithfield, Utah), 10 grams sucrose, and 8 grams Bacto agar, made up to 1.00 liter in distilled water), and placed in a tissue culture incubator set to 25 degrees Celsius. After the embryos have elongated, developed roots and true leaves have emerged, the seedlings are transferred to soil and grown out. Modification of all endogenous PDS alleles results in a plant unable to produce chlorophyll and having a visible bleached phenotype. Modification of a fraction of all endogenous PDS alleles results in plants still able to produce chlorophyll; plants that are heterozygous for an altered PDS gene will are grown out to seed and the efficiency of heritable genome modification is determined by molecular analysis of the progeny seeds.

### Example 13: Recombinase-Mediated Plasmid Integration in Human Cells

[0488] This example describes the use of a serine recombinase-based Gene Writer system for the targeted integration of a template DNA into the human genome. More specifically, this example describes the transfection of a two plasmid system into HEK293T cells for in vitro Gene Writing, e.g., as a means of evaluating a new Gene Writing polypeptide for integration activity in human cells.

[0489] Briefly, a two plasmid system was designed, comprising: 1) an integrase expression plasmid, e.g., a plasmid encoding a human codon optimized serine integrase, e.g., a serine integrase from Table 3A, Table 3B, or Table 3C, driven by the mammalian CMV promoter, and 2) a template plasmid, e.g., a plasmid comprising (i) a sequence comprising the recognition site of a serine integrase, e.g., a ˜500 bp sequence from the endogenous flanking region of a serine integrase, e.g., a sequence from the corresponding row of Table 2A, Table 2B, or Table 2C; (ii) a promoter for expression in mammalian cells, e.g., a CMV promoter; (iii) a reporter gene whose expression is controlled by (ii), e.g., an EGFP gene; (iv) a self-cleaving polypeptide, e.g., a T2A peptide; (v) a marker enabling selection in mammalian cells, e.g., a puromycin resistance gene; and (vi) a termination signal, e.g., a poly A tail. Without wishing to be bound by theory, some embodiments of the template plasmid may comprise elements occurring in the orientation (i), (ii), (iii), (iv), (v).

[0490] To deliver the Gene Writer system into HEK293T cells, 120,000 cells were transfected with either: (1) 50 ng template plasmid and 225 ng transfection balance plasmid (template only control); or (2) 50 ng template plasmid, 25 ng integrase expression plasmid, and 225 ng transfection balance plasmid, using TranslT-293 Reagent (Mirusbio) according to manufacturer's instructions. Three days post-transfection, the efficiency of delivery was measured using flow cytometry to determine the percentage of GFP positive cells. Cells were split between days 3 and 13 of the time course experiments. Between day 13 and day 27, transfected cells that had been split were maintained in one of two conditions: 1) a subset of the cells were maintained in normal cell culture medium and flow cytometry was performed every 3˜4 days to determine the GFP expression from successfully integrated template; 2) a subset of the cells were maintained in medium supplemented with 1 μg/mL puromycin, where the puromycin resistant cells were harvested after ˜2 weeks of selection. In some instances, a Gene Writer system that demonstrated activity in human cells resulted in detectable reporter expression in at least 3% of cells at day 21, e.g., detectable expression of GFP in at least 3% of cells as determined by flow cytometry. In some instances, a Gene Writer system that demonstrated activity in human cells resulted in detectable reporter expression in a percentage of cells that was greater than demonstrated with a template only control, e.g., higher as compared to transfection condition (1), e.g., at least 2, 3, 4, 5, 6, 7, 8, 9, 10, 20, 30, 40, 50, 60, 70, 80, 90, 100, 200, 300, 400, 500, 600, 700, 800, 900, or 1000-fold higher compared to a template only control.

[0491] To determine the integration site used by an active Gene Writer, the parallel cultures being maintained under puromycin selection were harvested for genomic isolation and analyzed by a unidirectional sequencing assay, as described herein in Example 18.

[0492] As shown in Table 30 below, Gene Writer polypeptides, e.g., serine recombinases from Table 3A, Table 3B, or Table 3C, were assayed for integration of a template DNA comprising a GFP expression cassette and a recognition sequence, e.g., a recognition sequence from a corresponding row of Table 2A, Table 2B, or Table 2C, in human cells (see Example 13).

TABLE 30
Screening data for recombinase-mediated integration in human cells

| Line No | FL58 Accession | Int ID | % GFP+ |
|---|---|---|---|
| 25 | NC_001978.3::NP_047974.1 | PhiC31 | 0.915333333 |
| 102 | KY030782.1::APD21144.1 | Int1 | 0 |
| 128 | KP296792.1::AJK27795.1 | Int2 | 3.35 |
| 1200 | YP_459991.1 | Int3 | 7.19 |
| 162 | MF595878.1::ATB52753.1 | Int4 | 0 |
| 1201 | AAB51419.1 | Int5 | 0 |
| 1202 | AAF35174.1 | Int6 | 0.18 |
| 1203 | YP_006082695.1 | Int7 | 0.048 |
| 118 | AY657002.1::AAT72400.1 | Int8 | 0 |
| 511 | MK448811.1::QBX21446.1 | Int9 | 0 |
| 5 | NC_029073.1::YP_009223763.1 | Int10 | 0 |
| 336 | KP836355.1::AJW76937.1 | Int11 | 0 |
| 161 | NC_030947.1::YP_009276898.1 | Int12 | 0 |
| 146 | MG711462.1::AUV56418.1 | Int13 | 0 |
| 330 | KU230356.1::ALY07619.1 | Int14 | 0.38 |
| 1204 | YP_005549228.1 | Int15 | 0 |
| 1205 | YP_189066.1 | Int16 | 0 |
| 1206 | YP_005679179.1 | Int17 | 0.123 |
| 103 | KC595514.1::AGR47239.1 | Int18 | 1.966755 |
| 186 | KM983329.1::AJA42614.1 | Int19 | 0 |
| 6 | NC_018836.1::YP_006906230.1 | Int20 | 0 |
| 4 | NC_028746.1::YP_009193857.1 | Int21 | 0.22 |
| 1207 | YP_002804732.1 | Int22 | 0.16 |
| 19 | NC_021325.1::YP_008058952.1 | Int23 | 0.04 |
| 320 | MH552499.1::AXF52129.1 | Int24 | 0.09 |
| 22 | MK448667.1::QBX13795.1 | Int25 | 0 |
| 1208 | YP_001089468.1 | Int26 | 0 |
| 1209 | YP_001886479.1 | Int27 | 0 |
| 35 | KX522565.1::AOA49517.1 | Int28 | 0 |
| 477 | NC_003216.1::NP_463492.1 | Int29 | 0.91 |
| 436 | NC_025453.1::YP_009103095.1 | Int30 | 10.07333333 |
| 386 | MK448715.1::QBX16366.1 | Int31 | 0 |
| 46 | KM983332.1::AJA42824.1 | Int32 | 0.31 |
| 1210 | BAA12435.1 | Int33 | 0 |
| 462 | JX507079.1::AFU62848.1 | Int34 | 0 |
| 1211 | YP_005759947.1 | Int35 | 0 |
| 458 | NC_019914.1::YP_007236569.1 | Int36 | 0.08 |
| 1212 | YP_004586821.1 | Int37 | 0 |
| 408 | NC_029069.1::YP_009223181.1 | Int38 | 6.3025 |
| 375 | MG969427.1::AVO22625.1 | Int39 | 0 |
| 1213 | YP_353073.2 | Int40 | 0 |
| 1214 | BAG46462.1 | Int41 | 0.05 |
| 434 | MK279899.1::AZS11727.1 | Int42 | 0.08 |
| 1215 | YP_006906969.1 | Int43 | 0.31 |
| 31 | KY676784.1::ARB11450.1 | Int44 | 0 |
| 43 | MG593803.1::AUG87323.1 | Int45 | 0.62 |
| 63 | MK937595.1::QDH92149.1 | Int46 | 0.61 |
| 147 | MH271298.1::AWY04899.1 | Int47 | 0 |
| 418 | MG593801.1::AUG87183.1 | Int48 | 0 |
| 142 | MK450421.1::QAX93309.1 | Int49 | 0 |
| 111 | NC_004682.2::NP_817623.1 | Int50 | 0 |
| 159 | KX641260.1::AOT24690.1 | Int51 | 2.005 |
| 1216 | YP_009031225.1 | Int52 | 0.111 |
| 202 | JF937108.1::AEK10337.2 | Int53 | 0 |
| 113 | MG944221.1::AVJ51390.1 | Int54 | 0.009 |
| 54 | KT124228.1::AKY03507.1 | Int55 | 0 |
| 96 | KC700556.1::AGM12072.1 | Int56 | 0.03 |
| 291 | NC_028960.2::YP_009214300.1 | Int57 | 0 |
| 295 | NC_022984.1::YP_008859055.1 | Int58 | 0 |
| 402 | MH834610.1::AYN57772.1 | Int59 | 0.04 |
| 27 | NC_004664.2::NP_813744.2 | Int60 | 0.17 |
| 23 | NC_018853.1::YP_006907228.1 | Int61 | 0 |
| 32 | MK686068.1::QBZ73369.1 | Int62 | 0.94 |
| 337 | MH155870.1::AWN05230.1 | Int63 | 0.11 |
| 67 | NC_031078.1::YP_009287835.1 | Int64 | 0 |
| 62 | NC_021560.1::YP_008130182.1 | Int65 | 0.29 |
| 491 | KT152029.1::AKY03358.1 | Int66 | 0.15 |
| 390 | MK392363.1::QAY15711.1 | Int67 | 0.24 |
| 304 | MH271308.1::AWY05745.1 | Int68 | 0 |
| 1217 | SGE40566.1 | Int69 | 0.05 |
| 335 | MF319184.1::ASR75970.1 | Int70 | 0.326 |
| 353 | JN243855.1::AEL19745.1 | Int71 | 0.61 |
| 28 | KT021004.1::ALA06428.1 | Int72 | 0 |
| 1218 | CBG73463.1 | Int73 | 0.038 |
| 435 | JN116825.1::AEV52018.1 | Int74 | 0.131 |
| 448 | MN096365.1::QDK02252.1 | Int75 | 0 |
| 331 | NC_007814.1::YP_512335.1 | Int76 | 2.53 |
| 332 | DQ221100.2::ABB55416.1 | Int77 | 1.71 |
| 371 | KY963371.1::ARW58518.1 | Int78 | 12.66 |
| 360 | KY963370.1::ARW58461.1 | Int79 | 9.36 |
| 338 | MK085976.1::AZF88373.1 | Int80 | 1.82 |
| 1219 | YP_001376196.1 | Int94 | 0.23 |
| 460 | JX887877.1::AFV15398.1 | Int95 | 4.89 |
| 474 | KF296717.1::AGV99364.1 | Int96 | 0.14 |
| 380 | MG727702.1::AUS03929.1 | Int97 | 0.93 |
| 1220 | AAD26564.1 | Int98 | 0 |
| 479 | KX190835.1::ANT40095.1 | Int99 | 0 |
| 461 | MF417928.1::ASN71601.1 | Int100 | 0.32 |
| 475 | MF417933.1::ASN71805.1 | Int101 | 21.03 |
| 478 | MH341451.1::AWN07855.1 | Int102 | 0.24 |
| 1221 | CAC97653.1 | Int103 | 0.22 |
| 1222 | CAD10281.2 | Int104 | 0.58 |
| 477 | NC_003216.1::NP_463492.1 | Int105 | 0.77 |
| 1223 | YP_004301563.1 | Int106 | 1.77 |
| 1224 | YP_006538656.1 | Int107 | 0 |
| 1225 | YP_006685721.1 | Int108 | 0 |
| 982 | NZ_CP030772.1::WP_138968117.1 | Int109 | 0.13 |
| 983 | NZ_CP011275.1::WP_082859072.1 | Int110 | 0.52 |
| 984 | NC_019309.1::YP_006962361.1 | Int111 | 0.17 |
| 985 | NZ_CP029174.1::WP_108943154.1 | Int112 | 0.57 |
| 986 | NZ_CP032696.1::WP_120708991.1 | Int113 | 0.2 |
| 987 | NC_011758.1::WP_012606065.1 | Int114 | 0.08 |
| 989 | NZ_CP014508.1::WP_082779173.1 | Int115 | 0.05 |
| 990 | NZ_AP018205.1::WP_017291662.1 | Int116 | 0.27 |
| 995 | NZ_CP024313.1::WP_104825745.1 | Int117 | 0.09 |
| 1005 | NC_013856.1::WP_012977106.1 | Int118 | 0.44 |
| 1012 | NZ_CP032692.1::WP_120663868.1 | Int119 | 0.17 |
| 1015 | NZ_AP014686.1::WP_049810452.1 | Int120 | 0 |
| 1037 | NZ_CP032687.1::WP_120667728.1 | Int121 | 0.12 |
| 1042 | NZ_CP019604.1::WP_066842370.1 | Int122 | 0.43 |
| 1072 | NC_021908.1::WP_020920456.1 | Int123 | 0 |
| 1081 | NC_015597.1::WP_013851017.1 | Int124 | 0 |
| 1085 | NC_014825.1::WP_013483873.1 | Int125 | 0.06 |
| 1091 | NZ_CP018901.1::WP_057039620.1 | Int126 | 0.26 |
| 1095 | NZ_CP009453.1::WP_053556490.1 | Int127 | 0.03 |
| 1097 | NZ_CP023038.1::WP_010511773.1 | Int128 | 0.06 |
| 1101 | NC_014824.1::WP_013483611.1 | Int129 | 0 |
| 1102 | NZ_CP014527.1::WP_066137218.1 | Int130 | 0 |
| 1105 | NZ_CP017949.1::WP_106721837.1 | Int131 | 0.13 |
| 1106 | NZ_CP015292.1::WP_011331383.1 | Int132 | 0.48 |
| 1109 | NC_013164.1::WP_012797137.1 | Int133 | 0.34 |
| 1112 | NZ_CM008899.1::WP_058686676.1 | Int134 | 0.05 |
| 1113 | LN997845.1::CUW33404.1 | Int135 | 0 |
| 1114 | NZ_CP017949.1::WP_106721836.1 | Int136 | 0 |
| 1115 | NZ_CP011583.1::WP_031623921.1 | Int137 | 0 |
| 1116 | NZ_CP035407.1::WP_129137749.1 | Int138 | 27.56 |
| 1120 | NZ_CP046245.1::WP_156276654.1 | Int139 | 0 |
| 1124 | NZ_AP018296.1::WP_096695372.1 | Int140 | 0.07 |
| 1127 | NC_014825.1::WP_013483758.1 | Int141 | 0.1 |
| 1128 | NZ_CP040905.1::WP_139896886.1 | Int142 | 0.07 |
| 1131 | NZ_CP021678.1::WP_080626804.1 | Int143 | 0.03 |
| 1132 | NZ_CP013238.1::WP_045144988.1 | Int144 | 0.5 |
| 1135 | NC_004954.1::NP_862380.1 | Int145 | 0 |
| 1138 | NZ_CP020539.1::WP_081570537.1 | Int146 | 0.3 |
| 1140 | NZ_CP014289.1::WP_061885392.1 | Int147 | 0.34 |
| 1141 | NC_018688.1::WP_148283638.1 | Int148 | 0.64 |
| 1147 | NZ_CP032704.1::WP_145892019.1 | Int149 | 0 |
| 1153 | NZ_CP042515.1::WP_151523155.1 | Int150 | 0.29 |
| 1156 | NC_007411.1::WP_011316659.1 | Int151 | 0 |
| 1160 | NZ_AP014816.1::WP_066349550.1 | Int152 | 0 |
| 1163 | NZ_CP028186.1::WP_007215987.1 | Int153 | 0 |
| 1164 | NZ_CP016078.1::WP_075740684.1 | Int154 | 0 |
| 1165 | NC_018688.1::WP_000398825.1 | Int155 | 0.18 |
| 1167 | NZ_LR134433.1::WP_084758891.1 | Int156 | 0.1 |
| 1171 | NC_017791.1::WP_014686872.1 | Int157 | 0 |
| 1174 | NZ_LR594663.1::WP_162590241.1 | Int158 | 0 |
| 1175 | NZ_CP015456.1::WP_072285883.1 | Int159 | 0.11 |
| 1179 | NC_008704.1::WP_011562846.1 | Int160 | 0.07 |
| 1180 | NC_006907.1::YP_220381.1 | Int161 | 0.08 |
| 1182 | NZ_CP045481.1::WP_153030621.1 | Int162 | 0 |
| 1183 | NZ_CP014850.1::WP_033698958.1 | Int163 | 2.7 |
| 1188 | NC_018696.1::WP_085963899.1 | Int164 | 0.03 |
| 1189 | NZ_CP021746.1::WP_103654430.1 | Int165 | 0.32 |
| 1193 | NC_006362.1::WP_011212228.1 | Int166 | 0.07 |
| 1196 | NC_005016.1::NP_863503.1 | Int167 | 0 |
| 1198 | NZ_CP007723.1::WP_040145024.1 | Int168 | 0.14 |
| 129 | NC_041909.1::YP_009598586.1 | Int169 | 1.45 |
| 321 | NC_004820.1::NP_852555.1 | Int170 | 0.07 |
| 450 | FM864213.1::CAR95427.1 | Int171 | 0.16 |
| 541 | AY657002.1::AAT72399.1 | Int172 | 0.23 |
| 529 | KT336320.1::ALA07058.1 | Int173 | 0.35 |
| 34 | MF172979.1::ASD51140.1 | Int174 | 0.34 |
| 132 | MF172979.1::ASD51126.1 | Int175 | 0.16 |
| 322 | KP836356.2::AMS33992.1 | Int176 | 2.43 |
| 26 | MG711467.1::AUV56803.1 | Int177 | 0 |
| 152 | MG711466.1::AUV56714.1 | Int178 | 0.06 |
| 1226 | YP_001384783.1 | Int179 | 0 |
| 148 | KU160495.1::ALY08054.1 | Int180 | 3.49 |
| 9 | MF766046.1::ATI18835.1 | Int181 | 0.14 |
| 1227 | YP_001392519.1 | Int182 | 0.22 |
| 472 | NC_013646.1::YP_003347458.1 | Int183 | 0 |
| 51 | HQ906662.1::ADW80128.1 | Int184 | 0.05 |
| 33 | JQ680357.1::AFB75709.1 | Int185 | 1.01 |
| 1228 | BAF67264.1 | Int186 | 0 |
| 1229 | NP_470568.1 | Int187 | 0.05 |
| 52 | NC_005262.3::NP_944235.2 | Int188 | 4.42 |
| 36 | KY092483.1::APD18725.1 | Int189 | 0.06 |
| 134 | MH271320.1::AWY06686.1 | Int190 | 0.17 |
| 50 | MK450426.1::QAX94052.1 | Int191 | 11.46 |
| 165 | NC_013694.1::YP_003358736.1 | Int192 | 0.57 |
| 1230 | YP_706485.1 | Int193 | 0 |
| 97 | NC_021304.1::YP_008051452.1 | Int194 | 0.19 |
| 326 | NC_041983.1::YP_009607592.1 | Int195 | 0.1 |
| 420 | MH834619.1::AYN58532.1 | Int196 | 0.01 |
| 42 | MG593800.1::AUG87127.1 | Int197 | 0.66 |
| 29 | MK450433.1::QAX95039.1 | Int198 | 0.35 |
| 82 | MH248947.1::AWY07618.1 | Int199 | 0.17 |
| 516 | JX262376.1::AFO10918.1 | Int200 | 0.11 |
| 548 | NC_042051.1::YP_009616474.1 | Int201 | 0.11 |
| 333 | NC_041971.1::YP_009605116.1 | Int202 | 0.38 |
| 441 | MF140416.1::ASR87211.1 | Int203 | 0.19 |
| 354 | NC_028947.1::YP_009212783.1 | Int204 | 0.37 |
| 988 | NZ_CP005961.1::WP_042933187.1 | Int206 | 0.18 |
| 991 | NZ_CP030772.1::WP_138968811.1 | Int207 | 0.14 |
| 992 | NC_011987.1::WP_012653163.1 | Int208 | 0.17 |
| 993 | NZ_CP036427.1::WP_145267375.1 | Int209 | 0.06 |
| 994 | NZ_CP018231.1::WP_065283598.1 | Int210 | 0.31 |
| 996 | NZ_CP020899.1::WP_010009933.1 | Int211 | 0.12 |
| 997 | NZ_CP016290.1::WP_065284390.1 | Int212 | 0.15 |
| 998 | NZ_CP050090.1::WP_166481266.1 | Int213 | 0.27 |
| 999 | NZ_CP016619.1::WP_099510182.1 | Int214 | 0.1 |
| 1000 | NZ_AP014659.1::WP_035679705.1 | Int215 | 0.04 |
| 1001 | NC_020061.1::WP_004112891.1 | Int216 | 0.14 |
| 1002 | NZ_CP032692.1::WP_120764347.1 | Int217 | 0.1 |
| 1003 | NZ_CP016457.1::WP_069067140.1 | Int218 | 0 |
| 1004 | NZ_AP014687.1::WP_063824339.1 | Int219 | 0 |
| 1006 | NC_016588.1::WP_014189963.1 | Int220 | 0.09 |
| 1007 | NC_013860.1::WP_012978683.1 | Int221 | 0 |
| 1008 | NC_013857.1::WP_012977507.1 | Int222 | 0.17 |
| 1009 | NC_021909.1::WP_020923455.1 | Int223 | 0.14 |
| 1010 | NZ_CP018231.1::WP_072642081.1 | Int224 | 0 |
| 1011 | NZ_CP031599.1::WP_057822058.1 | Int225 | 0.15 |
| 1013 | NZ_CP020447.2::WP_080620360.1 | Int226 | 0 |
| 1014 | NZ_CP013053.1::WP_037377708.1 | Int227 | 0.17 |
| 1016 | NZ_CP012899.1::WP_157097479.1 | Int228 | 0 |
| 1017 | NZ_CP016289.1::WP_065283428.1 | Int229 | 0 |
| 1018 | NZ_CP018231.1::WP_065283441.1 | Int230 | 0.21 |
| 1019 | NZ_CP053209.2::WP_027688391.1 | Int231 | 0.16 |
| 1020 | NZ_CP025615.1::WP_102115455.1 | Int232 | 0.1 |
| 1021 | NZ_CP049159.1::WP_165098388.1 | Int233 | 0.01 |
| 1022 | NC_006824.1::WP_011254970.1 | Int234 | 0.14 |
| 1023 | NZ_HG916854.1::WP_051509115.1 | Int235 | 0.05 |
| 1024 | NC_010627.1::WP_012404129.1 | Int236 | 0.24 |
| 1025 | NZ_CP023072.1::WP_037435892.1 | Int237 | 0.05 |
| 1026 | NC_000914.2::WP_010875070.1 | Int238 | 0 |
| 1027 | NZ_CP021815.1::WP_088198182.1 | Int239 | 0 |
| 1028 | NZ_CP026529.1::WP_088199679.1 | Int240 | 0.02 |
| 1029 | NC_019847.2::WP_015241694.1 | Int241 | 0 |
| 1030 | NC_019847.2::WP_049589666.1 | Int242 | 0.04 |
| 1031 | NZ_CP013419.1::WP_059581534.1 | Int243 | 0 |
| 1032 | NC_013193.1::WP_012806738.1 | Int244 | 0.12 |
| 1033 | NZ_CP013419.1::WP_059669918.1 | Int245 | 0.11 |
| 1034 | NZ_CP026685.1::WP_104902331.1 | Int246 | 0.18 |
| 1035 | NZ_CP024793.1::WP_100897719.1 | Int247 | 0.11 |
| 1036 | NZ_CP049701.1::WP_166349160.1 | Int248 | 0.22 |
| 1038 | NZ_CP023072.1::WP_037435909.1 | Int249 | 0 |
| 1039 | NZ_CP021216.1::WP_014531100.1 | Int250 | 0 |
| 1040 | NZ_CP014311.1::WP_062175057.1 | Int251 | 0 |
| 1041 | NC_009468.1::WP_043508908.1 | Int252 | 0.05 |
| 1043 | NZ_CP038639.1::WP_135707565.1 | Int253 | 0 |
| 1044 | NZ_CP017077.1::WP_069709769.1 | Int254 | 0.06 |
| 1045 | NZ_CP016620.1::WP_099515887.1 | Int255 | 0.28 |
| 1046 | NZ_CP016619.1::WP_099513340.1 | Int256 | 0.06 |
| 1047 | NC_008308.1::YP_718035.1 | Int257 | 0.03 |
| 1048 | NZ_CP015322.1::WP_006199992.1 | Int258 | 0.33 |
| 1049 | NZ_CP026528.1::WP_158528806.1 | Int259 | 0.07 |
| 1050 | NZ_LR594691.1::WP_102905083.1 | Int260 | 0 |
| 1051 | NC_020562.1::WP_015460498.1 | Int261 | 0 |
| 1052 | NZ_CP044544.1::WP_100951630.1 | Int262 | 0.22 |
| 1053 | NC_008760.1::WP_011798428.1 | Int263 | 0.05 |
| 1054 | NZ_CP013544.1::WP_011053437.1 | Int264 | 0 |
| 1055 | NZ_CP013572.1::WP_081278377.1 | Int265 | 0 |
| 1056 | NZ_CP018231.1::WP_081374274.1 | Int266 | 0.32 |
| 1057 | NZ_CP024313.1::WP_104825738.1 | Int267 | 0.44 |
| 1058 | NC_008378.1::WP_011649403.1 | Int268 | 0.03 |
| 1059 | NZ_CP017243.1::WP_004675975.1 | Int269 | 0.17 |
| 1060 | NZ_CP021214.1::WP_017273893.1 | Int270 | 0.1 |
| 1061 | NZ_CP023072.1::WP_095689837.1 | Int271 | 0.45 |
| 1062 | NC_009508.1::WP_011950828.1 | Int272 | 0.06 |
| 1063 | NZ_CP013535.1::WP_081279173.1 | Int273 | 0.01 |
| 1064 | NZ_CP017077.1::WP_069709873.1 | Int274 | 0.11 |
| 1065 | NZ_CP017077.1::WP_083274844.1 | Int275 | 0.4 |
| 1066 | NZ_CP016619.1::WP_099513354.1 | Int276 | 0 |
| 1067 | NZ_CP030355.1::WP_082057937.1 | Int277 | 0.19 |
| 1068 | NZ_CP015745.1::WP_064334697.1 | Int278 | 0.1 |
| 1069 | NZ_CP034911.1::WP_069456400.1 | Int279 | 0.26 |
| 1070 | NZ_CP030764.1::WP_112905663.1 | Int280 | 0 |
| 1071 | NC_007762.1::WP_011427411.1 | Int281 | 0.11 |
| 1073 | NZ_CP013633.1::WP_064842796.1 | Int282 | 0 |
| 1074 | NC_004041.2::WP_011053488.1 | Int283 | 0.5 |
| 1075 | NC_008381.1::WP_011654186.1 | Int284 | 0.14 |
| 1076 | NZ_CP020910.1::WP_086083774.1 | Int285 | 0 |
| 1077 | NZ_CP025015.1::WP_105009893.1 | Int286 | 0.17 |
| 1078 | NC_015579.1::WP_013831319.1 | Int287 | 0.06 |
| 1079 | NZ_CP039651.1::WP_109154411.1 | Int288 | 0.11 |
| 1080 | NZ_CP030762.1::WP_112907845.1 | Int289 | 0 |
| 1082 | NZ_CP016289.1::WP_065284176.1 | Int290 | 0.13 |
| 1083 | NZ_CP021819.1::WP_088201210.1 | Int291 | 0.14 |
| 1084 | NC_007960.1::WP_041359701.1 | Int292 | 0.04 |
| 1086 | NZ_CP026528.1::WP_158528808.1 | Int293 | 0.14 |
| 1087 | NZ_AP014686.1::WP_080587274.1 | Int294 | 0.11 |
| 1088 | NC_020061.1::WP_004112912.1 | Int295 | 0.07 |
| 1089 | NZ_CP017563.1::WP_154671697.1 | Int296 | 0.26 |
| 1090 | NZ_CP049735.1::WP_165586638.1 | Int297 | 0.2 |
| 1099 | NZ_CP016620.1::WP_099515711.1 | Int302 | 0 |
| 1100 | NZ_CP023549.1::WP_096787955.1 | Int303 | 0 |
| 1103 | NZ_CP014527.1::WP_066137015.1 | Int304 | 0 |
| 1104 | NZ_CP035512.1::WP_082731421.1 | Int305 | 0 |
| 1107 | NZ_CP021071.1::WP_084015878.1 | Int306 | 0 |
| 1108 | NZ_CP016453.1::WP_083217015.1 | Int307 | 0 |
| 1110 | NZ_CP016620.1::WP_099515874.1 | Int308 | 0 |
| 1111 | NZ_CP049701.1::WP_166354437.1 | Int309 | 0 |
| 1117 | NC_014825.1::WP_013483791.1 | Int310 | 0 |
| 1118 | NC_014825.1::WP_013483878.1 | Int311 | 0 |
| 1119 | NZ_CP044332.1::WP_016919146.1 | Int312 | 0 |
| 1121 | NZ_CP033248.1::WP_153738853.1 | Int313 | 0 |
| 1122 | NZ_CP013238.1::WP_071981582.1 | Int314 | 0 |
| 1123 | NZ_CM003332.1::WP_039285843.1 | Int315 | 0 |
| 1125 | NZ_CP015585.1::WP_083671481.1 | Int316 | 0 |
| 1126 | NZ_CP018336.1::WP_073541495.1 | Int317 | 0.55 |
| 1129 | NZ_CP033248.1::WP_153738854.1 | Int318 | 0 |
| 1130 | NC_014825.1::WP_013483874.1 | Int319 | 0 |
| 1133 | NZ_CP007453.1::WP_025436591.1 | Int320 | 0 |
| 1134 | NZ_CP017949.1::WP_106721914.1 | Int321 | 0 |
| 1137 | NZ_CP008945.1::WP_038606886.1 | Int322 | 0.17 |
| 1139 | NZ_CP046254.1::WP_140043508.1 | Int323 | 0 |
| 1142 | NC_002682.1::WP_044547337.1 | Int324 | 0.04 |
| 1143 | NC_008826.1::WP_011828792.1 | Int325 | 0.11 |
| 1144 | NZ_AP022320.1::WP_162071183.1 | Int326 | 0 |
| 1145 | NZ_LR135387.1::WP_000136908.1 | Int327 | 0 |
| 1146 | CP033508.1::QKC67623.1 | Int328 | 0 |
| 1148 | NZ_CP016080.1::WP_027047857.1 | Int329 | 0 |
| 1149 | NZ_CP032928.1::WP_162993116.1 | Int330 | 0 |
| 1150 | NZ_LR135483.1::WP_033652754.1 | Int331 | 0.09 |
| 1151 | NZ_LR594668.1::WP_162571537.1 | Int332 | 0 |
| 1152 | NZ_CP014289.1::WP_061885389.1 | Int333 | 0 |
| 1154 | NC_014825.1::WP_013483880.1 | Int334 | 0 |
| 1155 | NZ_CP014308.1::WP_062174163.1 | Int335 | 0 |
| 1157 | NZ_CP033248.1::WP_153738977.1 | Int336 | 0 |
| 1158 | NZ_LN907829.1::WP_067437236.1 | Int337 | 0 |
| 1159 | NZ_CM017044.1::WP_000709098.1 | Int338 | 0 |
| 1161 | NC_014825.1::WP_013483789.1 | Int339 | 0 |
| 1166 | NZ_CP031591.1::WP_111772986.1 | Int340 | 0 |
| 1168 | NC_003064.2::WP_162180340.1 | Int341 | 0 |
| 1169 | NZ_AFSD01000008.1::WP_035243797.1 | Int342 | 0 |
| 1170 | NZ_CP039905.1::WP_080843366.1 | Int343 | 0 |
| 1172 | NZ_LR594663.1::WP_162590298.1 | Int344 | 0 |
| 1173 | NC_009717.1::WP_157048325.1 | Int345 | 0 |
| 1176 | NZ_CP016593.1::WP_014538220.1 | Int346 | 0 |
| 1177 | NC_019761.1::WP_015211582.1 | Int347 | 0 |
| 1178 | NZ_CP014289.1::WP_061885391.1 | Int348 | 0 |
| 1181 | NC_007961.1::WP_011505253.1 | Int349 | 0 |
| 1184 | NZ_CP015439.1::WP_066328033.1 | Int350 | 0 |
| 1185 | AP022559.1::BBW99057.1 | Int351 | 0.52 |
| 1186 | NZ_LR134446.1::WP_068741343.1 | Int352 | 0.03 |
| 1187 | NC_019957.1::WP_015297851.1 | Int353 | 0 |
| 1190 | NZ_CP007453.1::WP_025436590.1 | Int354 | 0 |
| 1191 | NZ_CP017949.1::WP_106721912.1 | Int355 | 0 |
| 1195 | NZ_CP008945.1::WP_038606889.1 | Int356 | 0 |
| 507 | KY963369.1::ARW58402.1 | Int357 | 0 |
| 504 | KT336320.1::ALA07059.1 | Int358 | 0 |
| 530 | KT336321.1::ALA07121.1 | Int359 | 0 |
| 505 | KT336321.1::ALA07122.1 | Int360 | 0 |
| 531 | KX077896.1::ANM47644.1 | Int361 | 0 |
| 506 | KX077896.1::ANM47643.1 | Int362 | 0 |
| 532 | FN997652.1::CBR26922.1 | Int363 | 0 |
| 451 | FN997652.1::CBR26923.1 | Int364 | 0 |
| 133 | MF172979.1::ASD51128.1 | Int365 | 0 |
| 160 | MK448666.1::QBX13692.1 | Int366 | 0 |
| 552 | MK448666.1::QBX13693.1 | Int367 | 0 |
| 121 | MK448667.1::QBX13733.1 | Int368 | 0 |
| 106 | MK448667.1::QBX13731.1 | Int369 | 0 |
| 533 | MK448674.1::QBX14111.1 | Int370 | 0 |
| 508 | MK448674.1::QBX14110.1 | Int371 | 0 |
| 122 | MK448687.1::QBX14891.1 | Int372 | 0 |
| 542 | MK448687.1::QBX14890.1 | Int373 | 0 |
| 154 | MK448700.1::QBX15583.1 | Int374 | 0 |
| 107 | MK448700.1::QBX15585.1 | Int375 | 0 |
| 543 | MK448713.1::QBX16269.1 | Int376 | 0 |
| 550 | MK448719.1::QBX16517.1 | Int377 | 0 |
| 123 | MK448719.1::QBX16516.1 | Int378 | 0 |
| 144 | MK448720.1::QBX16591.1 | Int379 | 0 |
| 509 | MK448741.1::QBX17590.1 | Int380 | 0 |
| 534 | MK448741.1::QBX17591.1 | Int381 | 0 |
| 535 | MK448752.1::QBX18231.1 | Int382 | 0 |
| 510 | MK448752.1::QBX18232.1 | Int383 | 0 |
| 536 | MK448811.1::QBX21447.1 | Int384 | 0 |
| 124 | MK448819.1::QBX21895.1 | Int385 | 0 |
| 553 | MK448819.1::QBX21894.1 | Int386 | 0 |
| 125 | MK448825.1::QBX22171.1 | Int387 | 0 |
| 554 | MK448825.1::QBX22172.1 | Int388 | 0 |
| 126 | MK448835.1::QBX22708.1 | Int389 | 0 |
| 127 | MK448836.1::QBX22750.1 | Int390 | 0 |
| 518 | MK448838.1::QBX22844.1 | Int391 | 0 |
| 547 | MK448838.1::QBX22843.1 | Int392 | 0 |
| 135 | MK448846.1::QBX23238.1 | Int393 | 0.22 |
| 545 | MK448846.1::QBX23239.1 | Int394 | 0 |
| 546 | MK448847.1::QBX23319.1 | Int395 | 0 |
| 136 | MK448847.1::QBX23320.1 | Int396 | 0 |
| 155 | MK448934.1::QBX27918.1 | Int397 | 0 |
| 537 | MK448935.1::QBX27959.1 | Int398 | 0 |
| 519 | MK448935.1::QBX27960.1 | Int399 | 0 |
| 512 | MK448994.1::QBX31153.1 | Int400 | 0 |
| 538 | MK448994.1::QBX31154.1 | Int401 | 0 |
| 137 | MK448997.1::QBX31307.1 | Int402 | 0.1 |
| 138 | MK448997.1::QBX31309.1 | Int403 | 0 |
| 539 | MK448999.1::QBX31462.1 | Int404 | 0 |
| 540 | MK359990.1::QEM40854.1 | Int405 | 0 |
| 454 | MK359990.1::QEM40855.1 | Int406 | 0.19 |
| 1231 | YP_002336631.1 | Int407 | 0 |
| 1232 | ΥP_001646422.1 | Int408 | 0 |
| 183 | JQ660954.1::AFJ96082.1 | Int409 | 13.57 |
| 72 | NC_021865.1::ΥP_008320369.1 | Int410 | 1.65 |
| 184 | NC_030950.1::YP_009277275.1 | Int411 | 0 |
| 163 | NC_018264.1::YP_006546326.1 | Int412 | 0 |
| 185 | KM983327.1::AJA42491.1 | Int413 | 0 |
| 11 | MF766047.1::ATI18915.1 | Int414 | 0 |
| 10 | MF766048.1::ATI18993.1 | Int415 | 0 |
| 7 | MH590601.1::AXH70257.1 | Int416 | 0 |
| 17 | MH669004.1::AXQ61107.1 | Int417 | 0 |
| 8 | MK392364.1::QAY15794.1 | Int418 | 0 |
| 68 | KU517658.1::AMB17413.1 | Int419 | 0 |
| 1233 | NP_268897.1 | Int420 | 0 |
| 1234 | YP_005869510.1 | Int421 | 0 |
| 1235 | YP_002736920.1 | Int422 | 0.17 |
| 1236 | YP_003445547.1 | Int423 | 0.35 |
| 1237 | NP_112664.1 | Int424 | 0.33 |
| 1238 | YP_002747001.1 | Int425 | 0 |
| 480 | NC_027982.1::YP_009167795.1 | Int426 | 0 |
| 350 | NC_031929.1::YP_009323520.1 | Int427 | 5.2 |
| 157 | KX456210.1::ANS02547.1 | Int428 | 0 |
| 158 | DQ394810.1::ABD63849.1 | Int429 | 0.26 |
| 374 | KY349816.1::APZ81892.1 | Int430 | 0 |
| 345 | KJ608189.1::AIS74015.1 | Int431 | 12.97 |
| 372 | MF417874.1::ASN68226.1 | Int432 | 1.69 |
| 366 | MK448669.1::QBX13835.1 | Int433 | 0 |
| 410 | MK448672.1::QBX14038.1 | Int434 | 0 |
| 339 | MK448705.1::QBX15858.1 | Int435 | 0.1 |
| 340 | MK448708.1::QBX15966.1 | Int436 | 0 |
| 377 | MK448714.1::QBX16272.1 | Int437 | 0 |
| 341 | MK448742.1::QBX17688.1 | Int438 | 0 |
| 411 | MK448778.1::QBX19706.1 | Int439 | 0 |
| 404 | MK448826.1::QBX22213.1 | Int440 | 0 |
| 378 | MK448831.1::QBX22445.1 | Int441 | 0 |
| 342 | MK448834.1::QBX22610.1 | Int442 | 0 |
| 405 | MK448844.1::QBX23130.1 | Int443 | 0 |
| 412 | MK448849.1::QBX23375.1 | Int444 | 0 |
| 343 | MK448873.1::QBX24735.1 | Int445 | 0 |
| 381 | MK448874.1::QBX24736.1 | Int446 | 0 |
| 406 | MK448875.1::QBX24786.1 | Int447 | 0.16 |
| 346 | MK448878.1::QBX24961.1 | Int448 | 0 |
| 367 | MK448879.1::QBX25020.1 | Int449 | 0 |
| 407 | MK448898.1::QBX26003.1 | Int450 | 0 |
| 382 | MK448927.1::QBX27562.1 | Int451 | 0 |
| 344 | MK448940.1::QBX28214.1 | Int452 | 0 |
| 383 | MK448986.1::QBX30733.1 | Int453 | 0 |
| 421 | MK449012.1::QBX32092.1 | Int454 | 0 |
| 38 | MG711465.1::AUV56620.1 | Int455 | 0 |
| 49 | MF417875.1::ASN68324.1 | Int456 | 6.77 |
| 1239 | BAE05705.1 | Int457 | 0 |
| 1240 | YP003472505.1 | Int458 | 0 |
| 1241 | BAF92844.1 | Int459 | 3.29 |
| 456 | NC_007064.1::YP_240778.1 | Int460 | 0 |
| 457 | NC_007065.1::YP_240852.1 | Int461 | 15.17 |
| 464 | NC_008722.1::YP_950630.1 | Int462 | 0 |
| 465 | NC_008723.1::YP_950693.1 | Int463 | 0 |
| 466 | NC_031241.1::YP_009302049.1 | Int464 | 0 |
| 459 | NC_020490.2::YP_009130680.1 | Int465 | 0 |
| 500 | NC_019915.1::YP_007236622.1 | Int466 | 0 |
| 438 | NC_024391.1::YP_009044994.1 | Int467 | 0 |
| 467 | MF417895.1::ASN69744.1 | Int468 | 0 |
| 468 | MF417901.1::ASN70113.1 | Int469 | 0 |
| 469 | MF417930.1::ASN71670.1 | Int470 | 0 |
| 470 | MF417982.1::ASN72884.1 | Int471 | 0 |
| 423 | MF417958.1::ASN72539.1 | Int472 | 0 |
| 1242 | YP_003251752.1 | Int473 | 0 |
| 370 | NC_019544.1::YP_007010946.1 | Int474 | 0 |
| 437 | DQ453159.1::ABI36844.1 | Int475 | 2.64 |
| 392 | HM072038.1::ADF59162.1 | Int476 | 3.07 |
| 433 | KX965989.1::APC46450.1 | Int477 | 0 |
| 444 | MF417925.1::ASN71428.1 | Int478 | 11.77 |
| 445 | MF417893.1::ASN69614.1 | Int479 | 6.84 |
| 393 | MF417886.1::ASN69149.1 | Int480 | 38.07 |
| 379 | MK560763.1::QBP06974.1 | Int481 | 0.36 |
| 37 | KY092479.1::APD18506.1 | Int482 | 0 |
| 41 | KY092482.1::APD18671.1 | Int483 | 0 |
| 39 | KY092481.1::APD18613.1 | Int484 | 0 |
| 57 | KY092480.1::APD18560.1 | Int485 | 0.21 |
| 44 | KY092484.1::APD18778.1 | Int486 | 0.09 |
| 45 | MH825699.1::AYD86220.1 | Int487 | 0.72 |
| 143 | MK450431.1::QAX94753.1 | Int488 | 0 |
| 145 | JQ809701.1::AFL47903.1 | Int489 | 0 |

Individual polypeptides and cognate recognition sequences are shown in Table 30 with their Line No (corresponding to the Line No in Table 1A, 1B, 1C, 2A, 2B, 2C, 3A, 3B, 3C) in column 1 and were assigned an integrase identification name (“Int ID”) in column 3. The integration efficiency is indicated in column 4 as the percent of cells expressing GFP (“% GFP+”) as measured by flow cytometry at 21 days post-transfection in the absence of antibiotic selection.

[0493] In a further example, HEK293T cells were transfected with an integrase expression plasmid and a template plasmid harboring a 520 bp attP containing region followed by an EGFP reporter driven by CMV promoter. The percentage of EGFP positive cells at day 21 post-transfection was analyzed by flow cytometry. As shown in FIG. 1A, 9 out of 9 integrases depicted achieved higher integration efficiency compared to the positive control integrase PhiC31 in 293T cells. Data for integrases shown comprised greater than 2 replicates.

### Example 14: Dual AAV Delivery of Serine Integrase and Template DNA to Mammalian Cells

[0494] This example demonstrates the use of a serine recombinase based Gene Writer system for the targeted integration of a template DNA into the human genome. More specifically, a recombinase, e.g., an integrase with an amino acid sequence from Table 3A, 3B, or 3C, e.g., the Bxb1 recombinase protein (Table 3A Line No. 204), and a template DNA comprising the associated attachment site, e.g., a sequence from a LeftRegion or RightRegion of Table 2A, 2B, or 2C, e.g., the LeftRegion from Table 2A Line No. 204, are co-delivered to HEK293T cells as separate AAV viral vectors to insert DNA precisely and efficiently in a mammalian cell genome containing the corresponding Bxb1 attachment landing pad site.

[0495] Two transgene configurations are assessed to determine the integration, stability, and expression using different AAV donor formats (FIG. 1B): 1) template comprising attP* or attB* that utilizes formation of double-stranded circularized DNA following AAV transduction in the cell nucleus; or 2) template comprising double attachment sites, attP-attP* or attB-attB*, that can integrate into the mammalian genome independent of double-stranded circularization of the DNA following AAV transduction in the cell nucleus.

[0496] To prepare HEK293T cells for Bxb1-mediated genomic integration of a template, HEK293T landing pad cell lines were generated containing the Bxb1 attP-attP* or Bxb1 attB-attB* sites. HEK293T cells were seeded in 10 cm plates (5×10⁶ cells) prior to lentiviral transfection. Lentiviral transduction using the Lenti-X Packaging Single Shots (VSV-G, Takara Bio) was performed the following day with lentiviral vector plasmid DNA (containing attP-attP* or attB-attB*). Lentiviral titering was performed and the virus filtered using 0.22 μm filter and 1 mL lentiviral aliquots were made and stored at −80° C. HEK293T cells were seeded at 1×10⁵ cells/well in 4×6-well plates. HEK293T cells were then transduced with attP-attP* or attB-attB* lentivirus and cultured for 48 hours before starting puromycin selection (1 μg/mL). Cells were kept under puromycin selection for at least 7 days and then scaled up to 150 mm culture plates. The cells were then harvested for genomic DNA (gDNA) and assayed for lentivirus integration copy number by ddPCR.

[0497] Adeno-associated viral vectors containing Bxb1 integrase or the corresponding Bxb1 attP*/attP-attP* donor or Bxb1 attB*/attB-attB* donor were generated based on the pAAV-CMV-EGFP-WPRE-pA viral backbone (Sirion Biotech), but with replacement of the CMV promoter with the EF1a promoter. pAAV-Ef1a-BXB1-WPRE-pA was generated using a human codon optimized Bxb1 (GenScript). pAAV-Stuffer-attP*(Bxb1)-Ef1a-EGFP-WPRE-pA and pAAV-Stuffer-attB*(Bxb1)-Ef1a-EGFP-WPRE-pA template constructs contained a 500 bp stuffer sequence between the 5′ AAV2 ITR sequence and Ef1a promoter. pAAV-Stuffer-attP(Bxb1)-Ef1a-EGFP-WPRE-pA-attP*(Bxb1)-Stuffer and pAAV-Stuffer-attB(Bxb1)-Ef1a-EGFP-WPRE-pA-attB*(Bxb1)-Stuffer donor constructs contained a 500 bp stuffer sequence between the AAV2 ITR sequence and Ef1a promoter, as well as a 500 bp stuffer sequence between the 3′ attP*/attB* attachment site and 3′ AAV2 ITR sequence (FIG. 2). The above listed AAV vectors were packaged into AAV2 serotype (Sirion Biotech) at a 1¹³ total vg scale: AAV2-Ef1a-BXB1-WPRE-pA, AAV2-Stuffer-attP*(BXB1)-Ef1a-EGFP-WPRE-pA, AAV2-Stuffer-attB*(BXB1)-Ef1a-EGFP-WPRE-pA, AAV2-Stuffer-attP(BXB1)-Ef1a-EGFP-WPRE-pA-attP*(BXB1)-Stuffer, AAV2-Stuffer-attB(BXB1)-Ef1a-EGFP-WPRE-pA-attB*(BXB1)-Stuffer.

[0498] HEK293T landing pad cells containing either attP-attP* or attB-attB* landing pad sites were seeded in a 48-well plate format at 40,000 cells/well. 24 h later, the following conditions were tested: dual AAV transduction with 1) AAV2-attP*-Ef1a-EGFP with or without AAV2-Ef1a-BXB1 integrase, 2) AAV2-attP-attP*-Ef1a-EGFP donor with or without AAV2-Ef1a-BXB1 integrase, 3) AAV2-attB*-Ef1a-EGFP with or without AAV2-Ef1a-BXB1 integrase, 4) AAV2-attB-attB*-Ef1a-EGFP with or without AAV2-Ef1a-BXB1 integrase (FIG. 3A). The AAV comprising the integrase was dosed at an MOI of about 25,000, and the AAV comprising the template was dosed at an MOI of about 75,000. To assess the efficiency of a dual AAV delivery of a serine integrase and a template comprising its recognition site to integrate into the human genome, ddPCR was performed to quantify integration events (% CNV/landing pad) on day 3 and day 7 post-transduction. ˜5% integration was detected using an attB* donor to attP-attP* landing pad cell line, and this integration was stable and consistent at both timepoints (FIG. 3B), indicative of successful DNA Gene Writing by a dual AAV delivery system.

### Example 15: In Vitro Combination mRNA and AAV Delivery of a Gene Writing Polypeptide and Template DNA for Site-Specific Integration in Human Cells

[0499] This example demonstrates use of a Gene Writer system for the site-specific insertion of exogenous DNA into the mammalian cell genome. More specifically, a recombinase, e.g., an integrase with an amino acid sequence from Table 3A, 3B, or 3C, e.g., the Bxb1 recombinase protein (Table 3A Line No. 204), and a template DNA comprising the associated attachment site, e.g., a sequence from a LeftRegion or RightRegion of Table 2A, 2B, or 2C, e.g., the LeftRegion from Table 2A Line No. 204, are introduced into a HEK293T landing pad cell line. In this example, the recombinase is delivered as mRNA encoding the recombinase, and the template DNA is delivered via AAV.

[0500] HEK293T landing pad cells containing either the attP-attP* or attB-attB* landing pad sites (see Example 14) were seeded in a 48-well plate format at 40,000 cells/well. 24 h later, the following conditions were tested: 1) AAV2-attP*-Ef1a-EGFP with or without mRNA encoding the BXB1 integrase; 2) AAV2-attP-attP*-Ef1a-EGFP donor with or without mRNA encoding the BXB1 integrase; 3) AAV2-attB*-Ef1a-EGFP with or without mRNA encoding the BXB1 integrase; and 4) AAV2-attB-attB*-Ef1a-EGFP with or without mRNA encoding the BXB1 integrase (FIG. 4A). The mRNA encoding the integrase was dosed at about 1 μg and the AAV comprising the template was dosed at an MOI of about 75,000. The timing of delivery was also assessed by the following conditions: 1) mRNA delivery of BXB1 integrase and AAV delivery of template DNA on the same day, 2) mRNA delivery of BXB1 integrase 24 h prior to AAV delivery of template DNA, 3) AAV delivery of template DNA 24 h prior to mRNA delivery of BXB1 integrase. ddPCR was performed to assess the integration mediated through mRNA delivery of a serine integrase and AAV delivery of a template comprising its attachment, ddPCR was performed to assay for integration (% CNV/landing pad) on day 3 post-transfection of mRNA and post-transduction of AAV. ˜2-4% integration was detected using an attP* donor to attB-attB* landing pad 293T cell line (FIG. 4B). AAV delivery of attachment site donor 24 h prior to mRNA delivery of BXB1 integrase achieved the highest % CNV/landing pad of ˜4% (FIG. 3B). These results are indicative of successful DNA Gene Writing genome editing events that insert the AAV-delivered DNA fragment that is site-specific, mediated by mRNA delivery of serine integrase and AAV delivery of its respective site-specific attachment site.

### Example 16: Ex Vivo Combination mRNA and AAV Delivery of a Gene Writing Polypeptide and Template DNA to HSCs for the Treatment of Beta-Thalassemia and Sickle Cell Disease

[0501] This example describes delivery of mRNA encoding an integrase and AAV template DNA into C34+ cells (hematopoietic stem and progenitor cells) in order to write an actively expressed γ-globin gene cassette to treat genetic mutations that lead to beta-thalassemia and sickle cell disease.

[0502] In this example, AAV6 is used to deliver the template DNA. More specifically, the AAV6 template DNA includes, in order, 5′ ITR, an integrase attachment site, e.g., an attP or attB, e.g., a LeftRegion or RightRegion from Table 2A, 2B, or 2C, a pol II promoter, e.g., the human β-globin promoter, a human fetal γ-globin coding sequence, a poly A tail and 3′ITR. Considering the maximum volume limit of electroporation reagents, integrase mRNA and the AAV6 template are co-delivered into CD34 cells via different conditions, e.g.: 1) AAV6 template and integrase mRNA are co-electroporated; 2) integrase mRNA is electroporated 15 mins prior to AAV6 donor transduction.

[0503] After electroporation/transduction, cells are incubated in CD34 maintenance media for 2 days. Then, ˜10% of the treated cells are harvested for genomic DNA isolation to determine integration efficiency. The rest of the cells are transferred to erythroid expansion and differentiation media. After ˜20 days differentiation, three assays will be performed to determine the integration of γ-globin after erythroid differentiation: 1) a subset of cells is stained with NucRed (Thermo Fisher Scientific) to determine the enucleation rate; 2) a subset of the cells is stained with fluorescein isothiocyanate (FITC)-conjugated anti-γ-globin antibody (Santa Cruz) to determine the percentage of fetal hemoglobin positive cells; 3) a subset of the cells is harvested for HPLC to determine γ-globin chain expression.

### Example 17: Ex Vivo Delivery of a Gene Writer Polypeptide and Circular DNA Template for Generating CAR-T Cells

[0504] In this example, a Gene Writing system is delivered as a deoxyribonucleoprotein (DNP) to human primary T-cells ex vivo for the generation of CAR-T cells, e.g., CAR-T cells for treating B-cell lymphoma.

[0505] The Gene Writer polypeptide, e.g., integrase, e.g., integrase with a sequence from Table 3A, 3B, or 3C, is prepared and purified for use directly in its active protein form. For the template component, minicircle DNA plasmids that lack plasmid backbone and bacterial sequences are used in this example, e.g., prepared as according to a method of Chen et al. Mol Ther 8(3):495-500 (2003), wherein a recombination event is first used to excise these extraneous plasmid maintenance functions to minimize plasmid size and cellular response. Template DNA minicircles comprise, in order, an integrase attachment site (attP or attB), e.g., a LeftRegion or RightRegion from Table 2A, 2B, or 2C, a pol II promoter, e.g., EF-1, a human codon optimized chimeric Antigen Receptor (including an extracellular ligand binding domain, a transmembrane domain, and intracellular signaling domains), e.g., the CD19-specific Hu19-CD828Z (Genbank MN698642; Brudno et al. Nat Med 26:270-280 (2020)) CAR molecule, and a poly A tail. The template DNA is first mixed with purified integrase protein and incubated at room temperature for 15˜30 mins to form DNP complexes. Then, the DNP complex is nucleofected into activated T cells. Integration by the Gene Writer system is assayed using ddPCR for molecular quantification, and CAR expression is measured by flow cytometry.

### Example 18: Unidirectional Sequencing Assay for Determination of Integration Site

[0506] In this example, unidirectional sequencing is performed to determine the sequence of an unknown integration site with an unbiased profile of genome wide specificity.

[0507] Integration experiments are performed as in previous examples by using a Gene Writing system comprising an integrase and a template DNA for insertion. The integrase and donor plasmids are transfected into 293T cells. Genomic DNA is extracted at 72 hours post transfection and subjected to unidirectional sequencing according to the following method. First, a next generation library is created by fragmentation of the genomic DNA, end repair, and adaptor ligation. Next, fragmented genomic DNA harboring template DNA integration events is amplified by two-step nested PCR using forward primers binding to template specific sequence and reverse primers binding to sequencing adaptors. PCR products are visualized on a capillary gel electrophoresis instrument, purified, and quantified by Qubit (ThermoFisher). Final libraries are sequenced on a Miseq using 300 bp paired end reads (Illumina). Data analysis is performed by detecting the DNA flanking the insertion and mapping that sequence back to the human genome sequence, e.g., hg38.

### Example 19: Production of mRNA Encoding a Gene Writer Polypeptide

[0508] In this example, an integrase is expressed by in vitro transcription from mRNA. The mRNA template plasmid included the T7 promoter followed by the 5′UTR, the integrase coding sequence, the 3′ UTR, and ˜100 nucleotide long poly(A) tail. The plasmid is linearized by enzymatic restriction resulting in blunt end or 5′ overhang downstream of poly(A) tail and used for in vitro transcription (IVT) using T7 polymerase (NEB). Following IVT, the RNA is treated with DNase I (NEB). After buffer exchange, enzymatic capping is performed using Vaccinia capping enzyme (NEB) and 2′-O-methyltransferase (NEB) in the presence of GTP and SAM (NEB). The capped RNA is purified and concentrated using silica columns (for example, Monarch® RNA Cleanup kit) and buffered by 2 mM sodium citrate pH 6.5.

### Example 20: Use of Dual AAV Vector for the Treatment of Cystic Fibrosis in CFTR Mouse Model

[0509] In this example, a Gene Writing system is delivered as a dual AAV vector system for the treatment of cystic fibrosis in a mouse model of disease. Cystic fibrosis is a lung disease that is caused by mutations in the CTFR gene, which can be treated by the insertion of the wild-type CTFR gene into the genome of lung cells, such as cells found in the respiratory bronchioles and columnar non-ciliated cells in the terminal bronchiole.

[0510] A Gene Writing polypeptide, e.g., comprising a sequence of Table 3A, 3B, or 3C, and a template DNA comprising a cognate attachment site, e.g., an attB or attP site, e.g., a LeftRegion or RightRegion sequence of Table 2A, 2B, or 2C, are packaged into AAV6 capsids with expression of the polypeptide driven by the CAG promoter, the combination of which has been shown to be effective for high level transduction and expression in murine respiratory epithelial cells according to the teachings of Halbert et al. Hum Gene Ther 18(4):344-354 (2007).

[0511] AAV preparations are co-delivered intranasally to CFTR gene knockout (Cftr^{tm1Unc}) mice (The Jackson Labs) using a modified intranasal administration, as described previously (Santry et al. BMC Biotechnol 17:43 (2017)). Briefly, AAVs are packaged, purified, and concentrated with either an integrase or template DNA, comprising the CFTR gene under the control of a pol II promoter, e.g., CAG promoter, and a cognate attachment site. In some embodiments, the CFTR expression cassette is flanked by the integrase attachment sites. Prepared AAVs are each delivered at a dose ranging from 1×10¹⁰-1×10¹² vg/mouse using a modified intranasal administration to the CFTR knockout mouse. After one week, lung tissue is harvested and used for genomic extraction and tissue analysis. To measure integration efficiency, CFTR gene integration is quantified using ddPCR to determine the fraction of cells and target sites containing or lacking the insertion. To assay expression from successfully integrated CFTR, tissue is analyzed by immunohistochemistry to determine expression and pathology.

### Example 21: Method of Treating Ornithine Transcarbamylase Deficiency Through the Introduction of Transiently Expressed Integrase

[0512] Ornithine transcarbamylase (OTC) deficiency is a rare genetic disorder that results in an accumulation of ammonia due to not having efficient breakdown of nitrogen. The accumulation of ammonia leads to hyperammonemia that can debilitating and in severe cases lethal. This example describes the treatment of OTC deficiency by the delivery and expression of an mRNA encoding a Gene Writer polypeptide, e.g., an integrase sequence from Table 3A, 3B, or 3C, along with the delivery of an AAV providing the template DNA for integration. The AAV template comprises a wild-type copy of the human OTC gene under the control of a pol II promoter, e.g., ApoE.hAAT, and a cognate attachment site, e.g., an attB or attP site, e.g., a LeftRegion or RightRegion sequence of Table 2A, 2B, or 2C. In some embodiments, the OTC expression cassette is flanked by the integrase attachment sites.

[0513] In this example, LNP formulation of integrase mRNA follows the formulation of LNP-INT-01 (methods taught by Finn et al. Cell Reports 22:2227-2235 (2018), incorporated herein by reference) and template DNA is formulated in AAV2/8 (methods taught by Ginn et al. JHEP Reports (2019), incorporated herein by reference). Briefly, OTC deficiency is restored by treating neonatal Spf^{ash} mice (The Jackson Lab) by injecting LNP formulations (1-3 mg/kg) containing the integrase mRNA and AAV (1×10¹⁰-1×10¹² vg/mouse) containing the template DNA via the superficial temporal facial vein (Lampe et al. J Vis Exp 93:e52037 (2014)). The Spf^{ash} mouse has some residual mouse OTC activity which, in some embodiments, is silenced by the administration of an AAV that expresses an shRNA against mouse OTC as previously described (Cunningham et al. Mol Ther 19(5):854-859 (2011), the methods of which are incorporated herein by reference). OTC enzyme activity, ammonia levels, and orotic acid are measured as previously described (Cunningham et al. Mol Ther 19(5):854-859 (2011)). After 1 week, mouse livers are harvested and used for gDNA extraction and tissue analysis. The integration efficiency of hOTC is measured by ddPCR on extracted gDNA. Mouse liver tissue is analyzed by immunohistochemistry to confirm hOTC expression.

### Example 22: Use of a Gene Writing to Integrate a Large Payload into Human Cells

[0514] This example describes the integrase-mediated integration of a large payload into human cells in vitro.

[0515] In this example, the Gene Writer polypeptide component comprises an mRNA encoding an integrase, e.g., an integrase sequence of Table 3A, 3B, or 3C, and a template DNA comprising: a cognate attachment site, e.g., an attB or attP site, e.g., a LeftRegion or RightRegion of Table 2A, 2B, or 2C; a GFP expression cassette, e.g., a CMV promoter operably linked to EGFP; and stuffer sequence to bring the total plasmid size to approximately 20 kb.

[0516] Briefly, HEK293T cells are co-electroporated with the integrase mRNA and large template DNA. After three days, integration efficiency and specificity are measured. In order to measure efficiency of integration, droplet digital PCR (ddPCR) is performed on genomic DNA e.g., as described by Lin et al. Hum Gene Ther Methods 27(5):197-208 (2016), using primer-probe sets that amplify across the junction of integration, e.g., with one primer annealing to the template DNA and the other to an appropriate flanking region of the genome, such that only integration events are quantified. Data are normalized to an internal reference gene, e.g., RPP30, and efficiency is expressed as the average integration events per genome across the population of cells. To measure specificity, integration events in genomic DNA are assessed by unidirectional sequencing to determine genome coordinates, as described in Example 18.

### Example 23: Use of a Gene Writing to Integrate a Bacterial Artificial Chromosome into Human Embryonic Stem Cells Ex Vivo

[0517] This example describes the integrase-mediated integration of a bacterial artificial chromosome (BAC) into human embryonic stem cells (hESCs).

[0518] BAC vectors are capable of maintaining extremely large (>100 kb) DNA payloads, and thus can carry many genes or complex gene circuits that may be useful in cellular engineering. Though there has been demonstration of their integration into hESCs (Rostovskaya et al. Nucleic Acids Res 40(19):e150 (2012)), this was accomplished using transposons that lack sequence specificity in their integration patterns. This Example describes sequence-specific integration of large constructs.

[0519] In this example, a BAC engineered to carry the desired payload further comprises an attachment site, e.g., an attB or attP site, e.g., a LeftRegion or RightRegion from Table 2A, 2B, or 2C, that enables recognition by the Gene Writer polypeptide, e.g., an integrase, e.g., an integrase with a sequence of Table 3A, 3B, or 3C. An approximately 150 kb BAC is introduced into hESCs by electroporation or lipofection as per the teachings of Rostovskaya et al. Nucleic Acids Res 40(19):e150 (2012). After three days, integration efficiency and specificity are measured. In order to measure efficiency of integration, droplet digital PCR (ddPCR) is performed on genomic DNA e.g., as described by Lin et al. Hum Gene Ther Methods 27(5):197-208 (2016), using primer-probe sets that amplify across the junction of integration, e.g., with one primer annealing to the template DNA and the other to an appropriate flanking region of the genome, such that only integration events are quantified. Data are normalized to an internal reference gene, e.g., RPP30, and efficiency is expressed as the average integration events per genome across the population of cells. To measure specificity, integration events in genomic DNA are assessed by unidirectional sequencing to determine genome coordinates, as described in Example 18.

### Example 24: Use of Dual AAV Vector to Integrate a Transgene into a Mouse Model that Contains an Integrase Landing Pad Site

[0520] Integrase proteins are found naturally in bacteriophage and utilize a sequence of the phage genome (attP) to integrate the part of its genome into a bacteria's genome at a specific sequence (attB). Integrase proteins can be utilized as drivers to integrate DNA into a genome when supplied with a donor vector carrying an insert DNA that bears an appropriate recognition sequence (e.g. attP or attB) and the target or host genome bears a corresponding recognition sequence (e.g. attB or attP). This requirement for a specific sequence to be found in the host genome to have efficient integration can limit the use and/or efficacy of an integrase to insert a transgene into the genome of a mouse, making it challenging to create a mouse model or treat a disease found in the background of a mouse genetic disease model. In this example, a mouse engineered to have an attP recognition site (e.g., attP sequence for Bxb1 integrase) in its genome is used to demonstrate targeted integration by delivery of 1) an insert DNA that bears a sequence of interest and further comprises an attB recognition site (e.g., attB sequence for Bxb1 integrase) and 2) an integrase (e.g., Bxb1 integrase) that catalyzes the integration of the insert DNA into the genomic attP site. Further, in this example, the Bxb1-specific attP and attB recognition sequences used have the central dinucleotide changed from GT to GA. In some examples, the DNA sequence of interest is a heterologous object sequence comprising an RNA polymerase II promoter sequence (e.g., Human thyroxine binding globulin, TBG) and the DNA coding region of a therapeutic protein or a reporter gene (e.g., Renilla reniformis luciferase).

[0521] Briefly, AAVs (e.g., AAV-DJ) are packaged, purified, and concentrated with either a construct comprising DNA encoding an integrase protein (e.g., Bxb1) or comprising the insert DNA (e.g., Renilla reniformis luciferase under the control of TBG promoter and the described attB sequence). Mice with a stable integration of the attP recognition sequence are co-administered one or both of the two AAV viruses via intraperitoneal injection at doses ranging from 1×10¹⁰-1×10¹³ vg per virus per mouse. The integration is monitored over time by unidirectional sequencing of livers, among other organs, as previously described. In-life imaging of the luciferase expression is monitored as previously described (Bhaumik, S., & Gambhir, S. S., PNAS 2002, https://doi.org/10.1073/pnas.012611099).

### Example 25: Treatment of Multiple Diseases with a Single Composition Incorporating Multiple Genes

[0522] Ornithine transcarbamylase (OTC) deficiency and Citrullinemia type I are distinct diseases caused by mutations in different genes (OTC and ASS1, respectively) that both result in disruption of the urea cycle, ultimately leading to the accumulation of nitrogen (as ammonia) in the blood. The accumulation of ammonia leads to hyperammonemia, which can ultimately cause tissue and neurotoxicity with debilitating and potentially fatal consequences.

[0523] This example describes the design and use of a single Gene Writing system that can be provided for treatment of more than one disease. More specifically, this example describes the treatment of OTC deficiency or Citrullinemia type I by the delivery and expression of an mRNA encoding a Gene Writer polypeptide, e.g., an integrase sequence from Table 3A, Table 3B or Table 3C, and an AAV comprising a template DNA for integration. The template DNA in this example comprises functional copies of both the human OTC and ASS1 genes separated by a self-cleaving peptide (for example 2A) under the control of a pol II promoter, e.g., ApoE.hAAT, and a cognate attachment site, e.g., an attB or attP site, e.g., a LeftRegion or RightRegion sequence of Table 2A, Table 2B, or Table 2C. In some embodiments, the expression cassette comprising both OTC and ASS1 is flanked by integrase attachment sites. The composition described is used to treat either OTC deficiency or Citrullinemia type I.

[0524] In this example, LNP formulation of integrase mRNA follows the formulation of LNP-INT-01 (methods taught by Finn et al. Cell Reports 22:2227-2235 (2018), incorporated herein by reference) and template DNA is packaged in AAV2/8 (methods taught by Ginn et al. JHEP Reports (2019), incorporated herein by reference). Briefly, OTC deficiency is restored by treating neonatal Spf^{ash} mice (The Jackson Lab) by injecting LNP formulations (1-3 mg/kg) containing the integrase mRNA and AAV (1×10¹⁰-1×10¹² vg/mouse) containing the template DNA via the superficial temporal facial vein (Lampe et al. J Vis Exp 93:e52037 (2014)). The Spf^{ash} mouse has some residual mouse OTC activity which, in some embodiments, is silenced by the administration of an AAV that expresses an shRNA against mouse OTC as previously described (Cunningham et al. Mol Ther 19(5):854-859 (2011), the methods of which are incorporated herein by reference). OTC enzyme activity, ammonia levels, and orotic acid are measured as previously described (Cunningham et al. Mol Ther 19(5):854-859 (2011)). After 1 week, mouse livers are harvested and used for gDNA extraction and tissue analysis. The integration efficiency of hOTC is measured by ddPCR on extracted gDNA. Mouse liver tissue is analyzed by immunohistochemistry to confirm hOTC expression.

[0525] In some embodiments, the same composition described and used to treat a model of OTC deficiency above may also be used to treat Citrullinemia type I. Briefly, ASS1 deficiency is restored by treating a neonatal lethal argininosuccinate synthetase (ASS) knockout mouse model (Cindy Y Kok et al, Mol Ther. 21(10):1823-1831 (2013), the methods of which are incorporated herein by reference in their entirety) using the described LNP and AAV. Specifically, ASS knockout mice are injected with LNP formulations (1-3 mg/kg) containing the integrase mRNA and AAV (1×10¹⁰-1×10¹² vg/mouse) containing the template DNA via the superficial temporal facial vein (Lampe et al. J Vis Exp 93:e52037 (2014)). Ammonia levels, orotic acid and overall mice survival are measured as previously described (Cindy Y Kok et al, Mol Ther. 21(10):1823-1831 (2013)). After 2-4-8 weeks, mouse livers are harvested and used for gDNA extraction and tissue analysis. The integration efficiency of hASS1 is measured by ddPCR on extracted gDNA. Mouse liver tissue is analyzed by immunohistochemistry to confirm hASS1 expression.

[0526] In some embodiments, the Gene Writing system integrates the OTC-ASS1 expression cassette into OTC deficiency and ASS1 knockout mouse models. This same system thus restores healthy urea cycles in both models. In some embodiments, blood ammonia levels are reduced from hyperammonemia to normal levels, e.g., OTC deficiency or ASS1 knockout mice treated with the Gene Writing system show at least a 2, 5, 10, 50, or at least a 100-fold reduction in blood ammonia levels relative to control mice. In some embodiments, orotic acid levels are reduced from elevated to normal levels, e.g., OTC deficiency or ASS1 knockout mice treated with the Gene Writing system show at least a 2, 5, 10, 50, or at least a 100-fold reduction in orotic acid levels relative to control mice.

### Example 26: Selection of Lipid Reagents with Reduced Aldehyde Content

[0527] In this example, lipids are selected for downstream use in lipid nanoparticle formulations containing Gene Writing component nucleic acid(s), and lipids are selected based at least in part on having an absence or low level of contaminating aldehydes. Reactive aldehyde groups in lipid reagents may cause chemical modifications to component nucleic acid(s), e.g., RNA, e.g., template RNA, during LNP formulation. Thus, in some embodiments, the aldehyde content of lipid reagents is minimized.

[0528] Liquid chromatography (LC) coupled with tandem mass spectrometry (MS/MS) can be used to separate, characterize, and quantify the aldehyde content of reagents, e.g., as described in Zurek et al. The Analyst 124(9):1291-1295 (1999), incorporated herein by reference. Here, each lipid reagent is subjected to LC-MS/MS analysis. The LC/MS-MS method first separates the lipid and one or more impurities with a C8 HPLC column and follows with the detection and structural determination of these molecules with the mass spectrometer. If an aldehyde is present in a lipid reagent, it is quantified using a staple-isotope labeled (SIL) standard that is structurally identical to the aldehyde, but is heavier due to C13 and N15 labeling. An appropriate amount of the SIL standard is spiked into the lipid reagent. The mixture is then subjected to LC-MS/MS analysis. The amount of contaminating aldehyde is determined by multiplying the amount of SIL standard and the peak ratio (unknown/SIL). Any identified aldehyde(s) in the lipid reagents is quantified as described. In some embodiments, lipid raw materials selected for LNP formulation are not found to contain any contaminating aldehyde content above a chosen level. In some embodiments, one or more, and optionally all, lipid reagents used for formulation comprise less than 3% total aldehyde content. In some embodiments, one or more, and optionally all, lipid reagents used for formulation comprise less than 0.3% of any single aldehyde species. In some embodiments, one or more, and optionally all, lipid reagents used in formulation comprise less than 0.3% of any single aldehyde species and less than 3% total aldehyde content.

### Example 27: Quantification of RNA Modification Caused by Aldehydes During Formulation

[0529] In this example, the RNA molecules are analyzed post-formulation to determine the extent of any modifications that may have happened during the formulation process, e.g., to detect chemical modifications caused by aldehyde contamination of the lipid reagents (see, e.g., Example 26).

[0530] RNA modifications can be detected by analysis of ribonucleosides, e.g., as according to the methods of Su et al. Nature Protocols 9:828-841 (2014), incorporated herein by reference in its entirety. In this process, RNA is digested to a mix of nucleosides, and then subjected to LC-MS/MS analysis. RNA post-formulation is contained in LNPs and must first be separated from lipids by coprecipitating with GlycoBlue in 80% isopropanol. After centrifugation, the pellets containing RNA are carefully transferred to a new Eppendorf tube, to which a cocktail of enzymes (benzonase, Phosphodiesterase type 1, phosphatase) is added to digest the RNA into nucleosides. The Eppendorf tube is placed on a preheated Thermomixer at 37° C. for 1 hour. The resulting nucleosides mix is directly analyzed by a LC-MS/MS method that first separates nucleosides and modified nucleosides with a C18 column and then detects them with mass spectrometry.

[0531] If aldehyde(s) in lipid reagents have caused chemical modification, data analysis will associate the modified nucleoside(s) with the aldehyde(s). A modified nucleoside can be quantified using a SIL standard which is structurally identical to the native nucleoside except heavier due to C13 and N15 labeling. An appropriate amount of the SIL standard is spiked into the nucleoside digest, which is then subjected to LC-MS/MS analysis. The amount of the modified nucleoside is obtained by multiplying the amount of SIL standard and the peak ratio (unknown/SIL). LC-MS/MS is capable of quantifying all the targeted molecules simultaneously.

[0532] In some embodiments, the use of lipid reagents with higher contaminating aldehyde content results in higher levels of RNA modification as compared to the use of higher purity lipid reagents as materials during the lipid nanoparticle formulation process. Thus, in preferred embodiments, higher purity lipid reagents are used that result in RNA modification below an acceptable level.

### Example 28: Gene Writers for Integration of a CAR in T-Cells In Vivo

[0533] This example describes a Gene Writer™ genome editing system delivered T-cells in vivo for integration and stable expression of a genetic payload. Specifically, targeted nanoparticles are used to deliver a Gene Writing system capable of integrating a chimeric antigen receptor (CAR) expression cassette into the genome of T-cells to generate CAR-T cells in a murine model.

[0534] In this example, a Gene Writing system comprises an mRNA encoding a Gene Writing polypeptide, e.g., a recombinase enzyme described herein, and an insert DNA comprising a recombinase recognition site and a transgene cassette, wherein the transgene cassette comprises the coding sequence for the CD19-specific m194-1BBz CAR driven by the EF1a promoter (Smith et al. Nat Nanotechnol 12(8):813-820 (2017)). In order to achieve delivery specifically to T-cells, targeted LNPs (tLNPs) are generated that carry a conjugated mAb against CD4. See, e.g., Ramishetti et al. ACS Nano 9(7):6706-6716 (2015). Alternatively, conjugating a mAb against CD3 can be used to target both CD4⁺ and CD8⁺ T-cells (Smith et al. Nat Nanotechnol 12(8):813-820 (2017)). In other embodiments, the nanoparticle used to deliver to T-cells in vivo is a constrained nanoparticle that lacks a targeting ligand, as taught by Lokugamage et al. Adv Mater 31(41):e1902251 (2019).

[0535] The tLNP can be made by first preparing the nucleic acid mix (e.g., polypeptide mRNA: template DNA molar ratio of 1:40) with a mixture of lipids (cholesterol, DSPC, PEG-DMG, Dlin-MC3-DMA, and DSPE-PEG-maleimide) and then chemically conjugating the desired DTT-reduced mAb (e.g., anti-CD4, e.g., clone YTS.177) to the maleimide functional group on the LNPs. See Ramishetti et al. ACS Nano 9(7):6706-6716 (2015).

[0536] Six to 8 week old C57BL6/J mice are injected intravenously with formulated LNP at a dose of 1 mg RNA/kg body weight. Blood is collected at one day and three days post-administration in heparin-coated collection tubes, and the leukocytes are isolated by density centrifugation using Ficoll-Paque PLUS (GE Healthcare). Five days post-administration, animals are euthanized and blood and organs (spleen, lymph nodes, bone marrow cells) are harvested for T-cell analysis. Expression of the anti-CD19 CAR is detected by FACS using specific immunological sorting. Positive cells are confirmed for integration by methods as described herein, e.g., molecular combing or Q-FISH.

### Example 29: Characterization of Integration Sites by Molecular Combing

[0537] AAV genomes are known to undergo multiple mechanisms of intra and intermolecular recombination after delivery to cells (McCarty et al Annu Rev Genet 38:819-45 (2004)). Since an insert DNA may be delivered via an AAV vector, it is possible that in this context, some of the molecules may occur as concatemers, and when used as a substrate for Gene Writing, these concatemeric insert DNA molecules may result in the integration of more than one copy of the original insert DNA. It may thus be useful to analyze the fraction of integration events that result in single vs concatemeric insertions of the template DNA, the average number of copies per integration site, and the orientation of concatemeric molecules, e.g., the frequency of head-to-head or head-to-tail conformations. This example describes the use of molecular combing technology to determine the configuration of integration sites after AAV-mediated delivery of a Gene Writing system in human cells.

[0538] The Bxb1 recombinase (Table 3A, Line No 204) is an enzyme that has been used to integrate DNA in human cells that have been modified to contain an appropriate recognition site in the genome, and is used here as a representative example of recombinase systems disclosed herein. In this example, HEK293T landing pad cell lines are generated by single copy infection with a lentiviral vector containing the BXB1 attP-attP* site. To perform the recombinase-mediated integration, single copy landing pad cells are first seeded in a 48-well plate at ˜40,000 cells/well. At ˜24 hr post-seeding, adeno-associated viral vectors containing the BXB1 attB*donor (cognate recognition site to the attP* site in the landing pad) are transduced with an AAV containing an insert DNA in the presence or absence of a second AAV comprising the coding sequence for Bxb1 integrase. 2 weeks post transduction, ˜10% of the AAV transduced cells are harvested and gDNA is analyzed using a ddPCR assay specific to the landing pad site to confirm integration (% CNV/landing pad). Methods for molecular combing follow the approach of Kaykov et al Sci Rep 6:19636 (2016), incorporated herein by reference in its entirety. Briefly, ˜300,000 transduced cells from each transduced sample are extracted for high molecular weight genomic DNA into an agarose plug. Genomic DNA molecules are then mechanically stretched and aligned in a controlled and consistent manner on the glass surface, enabling precise and direct measurements along the length of the DNA fiber. In-situ hybridization is performed using prelabeled DNA probes that enable visualization for integration site configuration analysis. Probes for the Bxb1 attP-attP* landing pad (target site), AAV Bxb1 attB*donor sequence (insert DNA), and reference gene RPP30 are labeled using three distinct colors for differentiating the signal from each probe. Post hybridization, fluorescence signals are acquired and quantified. By this method, the number and location of the distinct fluorescence signals relative to each other provide a view of the insert copy number and orientation within integrated DNA.

### Example 30: Determination of Integration Sites by Inverse PCR

[0539] This example describes the characterization of integration sites for a Gene Writer system. In some embodiments, a Gene Writer system may exhibit exquisite specificity for a single target site or target sequence. In other embodiments, a Gene Writer system may have a more relaxed specificity and catalyze integration of an insert DNA at a variety of locations in the genome. Thus, for any given Gene Writer, it is useful to determine the breadth of its integration profile.

[0540] In this example, a Gene Writing system is used to modify the genome of HEK293T cells as described in any of the preceding Examples. After transfection, HEK293T cells are cultured for at least 4 days and then assayed for site-specific genome editing. Genomic DNA is first digested with pairs of restriction enzymes that generate incompatible cohesive ends and that cut at least once in the insert DNA, and then self-ligated to generate circular DNA ideally comprising both insert DNA and flanking genomic DNA. Inverted PCR amplification is conducted as described in Olivares et al Nat Biotechnol 20:1124-1128 (2002), the methods of which are incorporated herein by reference in their entirety, using forward and reverse primers specific to the insert DNA that will result in amplification of adjacent genomic DNA. Amplified PCR products are then sequenced using next generation sequencing technology on a MiSeq instrument. For sequence analysis, MiSeq reads are mapped to the HEK293T genome to identify locations of integration. In some embodiments, a Gene Writer system described herein results in detectable integration at a single site. In some embodiments, a Gene Writer system described herein results in detectable integration at a limited number of sites, e.g., less than 100, 90, 80, 70, 60, 50, 45, 40, 35, 30, 25, 20, 15, 10, 9, 8, 7, 6, 5, 4, 3, or less than 2 sites. In other embodiments, a Gene Writer system described herein results in detectable integration at more than 100 sites.

LENGTHY TABLES
The patent application contains a lengthy table section. A copy of the table is available in electronic form from the USPTO web site (https://seqdata.uspto.gov/?pageRequest=docDetail&DocID=US20230131847A1). An electronic copy of the table will also be available from the USPTO upon request and payment of the fee set forth in 37 CFR 1.19(b)(3).

The application's sequence listing, which the Patent Office published only in electronic form, follows.

SEQUENCE LISTING (3801 sequences)

SEQ ID NO: 1 - DNA, 260 bp, Artificial Sequence
  Description of Artificial Sequence: Synthetic polynucleotide
aagagcgcaagcgccgcgcgcaaggcgtatcgcggcgtcgaggtggccccgaaagaccccgttgaaacccattttcagaagctgttgacggactgggcgcgggcgcccaaggccgcgcggcggcggttcgtgcgcgagcgggcggacgatctggccgcgctcatggccgatctgccggacgcatcggaaggcggtgcggcatgagccgggagcctgcccaactgtggtggacggctgcggagatcgccgcggcagggttg

SEQ ID NO: 2 - DNA, 260 bp, Artificial Sequence
  Description of Artificial Sequence: Synthetic polynucleotide
ccgaaataccgggctcaacggctgagctacgacagctggggtgatcaggcgatcaactgacaaaggagccgccgggggtgtgctgaccccacggcggcatgacgaagcaaggagaagatgatggacggagcaggaatggtcaacagggtgacgacagtcgcgccactgcgcaatgtgatgctgctgacggagctgatcgaacgggttcggaaccgcgacgacgatctgccgggcatggcatgcttttcggggccgagcgg

SEQ ID NO: 3 - DNA, 260 bp, Artificial Sequence
  Description of Artificial Sequence: Synthetic polynucleotide
caatccgcagaataccgggggttcgcgcgcatgcgccgggccttcggcgaagacgaataacgagaaaaggagcagagcatgacaccgtccatcgcgcccctgcgcaatgtcgccgctctcgtcggtctcgtcgatcgcgtgcagaaccgcgcgttcggcctgccggggatggcgaccttctacggcccctcgggctggggcaagaccaccgccgtcaccttcgcaggcaacgagttccaggcgcatgtcgtccaggtcaa

SEQ ID NO: 4 - DNA, 260 bp, Artificial Sequence
  Description of Artificial Sequence: Synthetic polynucleotide
aaatgtgtgccacgggacatgaagaagttaaatcaaatcattaagattctgcatatgtaacaaaaccaacccagtataaagacgggttggttttatatattataaaatcattaaaatgtcatccactgctgctctgtaagcaaattcaatcaattcagatttagagtgaaataggtcctcaagatataaataattttttacttcattttcaggaatatatttcataagctccttaaagcttttctcgaatttcagaactg

SEQ ID NO: 5 - DNA, 260 bp, Artificial Sequence
  Description of Artificial Sequence: Synthetic polynucleotide
gaaagtctatttcatgttattgaaacaactatatcaggtaggagagtaaaagcatcatgagaatggtcgatttaattgcgaaaaaacgggatggttatgagctttcaaaagaagaaattgattttatcatccgcggttacacgaacggcgacattcctgattatcaaatggcttctatgttaatggcaatttatttcaatggcatgtctaaagaagaaatctctgccttaactaatgccatgattaattctggtgaaaca

SEQ ID NO: 6 - DNA, 260 bp, Artificial Sequence
  Description of Artificial Sequence: Synthetic polynucleotide
gacgttgacggacggggttcacggatgcagatagcctgcgtcgcatcgttgacggtatgagcaagcgcgcggcggcctccaccagcgaggactaggagtccatgcgaagggccgggcagggattactccctcccggccctttctgctgccttcagccttgtcgagggtgcgggaacgcccgcacgagatgctcggcgcacgtctccgcgctcggtccggcaaccggctggccgcaggggtagccgtgcacccacgtggcc

SEQ ID NO: 7 - DNA, 260 bp, Artificial Sequence
  Description of Artificial Sequence: Synthetic polynucleotide
acgggtacatcatcttcccgaatcctcttcgctcagatggatttcaatccaactcgctgagagcgggaactcgggcccccaccttacgaggtgggggcctcttcgcgtccaagggccctctctggaggcgccatccctacgtgcccaatcggcgtacgctggttgggaggtgattcgatgtcgctccaagagaacatccgtagccatcggcgccggaaggggtggacccaagagcagcttgccgaggaggcagacgtctc

SEQ ID NO: 8 - DNA, 260 bp, Artificial Sequence
  Description of Artificial Sequence: Synthetic polynucleotide
acgggcacatcatcttcccgaatcctcttcgctcagatggatttcaatccaactcgctgagagcgggaactcgggcccccaccttacgaggtgggggcctcttcgcgttcaagggccctctctggaggcgccatccctacgtgcccaatcggcgtacgctggttgggaggtgattcgatgtcgctccaagagaacatccgtagccatcggcgccggaaggggtggacccaagagcagcttgccgaggaggcagacgtctc

SEQ ID NO: 9 - DNA, 260 bp, Artificial Sequence
  Description of Artificial Sequence: Synthetic polynucleotide
gggattcgcgggaacgcttcaggtttcgagttcgagatcggcagcaccaaggcgtcctgactggtcaactggcccccggcgtaactggctcagccgtactcttgacgcatgagcgtcgacctgggtgagcggattcgcgaggtacgcaagcgtcggggcctgactcagcgccaactggccgaactgtcaggcgtgtccctctccctcgtccggaaactggagcagggggagaggagcgacacgcggctggagacggcgcg

SEQ ID NO: 10 - DNA, 260 bp, Artificial Sequence
  Description of Artificial Sequence: Synthetic polynucleotide
acgggcacatcatcttcccgaatcctcttcgctcagatggatttcaatccaactcgctgagagcgggaactcgggcccccaccttacgaggtgggggcctcttcgcgttcaagggccctccctggaggcgccatccctacgtgcccaatcggcgtacgctggttgggaggtgattcgatgtcgctccaagagaacatccgtagccatcggcgccggaaggggtggacccaagagcagcttgccgaggaggcagacgtctc

SEQ ID NO: 11 - DNA, 260 bp, Artificial Sequence
  Description of Artificial Sequence: Synthetic polynucleotide
ggaattcgcgcgaccacttcaggtttcgagttcgagatcgcgagcacgaaggcgtcctgaccagggcaaacagagggccccccgccttgcggcagggggccttcgtcatttccggcgccactggatggggatcgggggctgccgatcgaagtgatcgacgcacctgtcagtgaggcggctcatcgctggcttcccgcacaggtagccgtatgcccactgctcggcgatgctcccatcctctcgcttgaaccggatcttct

SEQ ID NO: 12 - DNA, 260 bp, Artificial Sequence
  Description of Artificial Sequence: Synthetic polynucleotide
gcatcgtgcggatgtgattgcgggacttaagaaaagaaagctctctttatcagctctttcccggcagtttggttatgcgccaactacattagctaatgcgctagaacgacactggccaaagggtgagcagattattgctaacgccttagaaactaaaccggaagtaatctggcctagccgatatcaagcaggtgaataacatggaactttgggtatcaccgaaagagtgtgcgaatcttcctggtttgccgaaaacatcg

SEQ ID NO: 13 - DNA, 260 bp, Artificial Sequence
  Description of Artificial Sequence: Synthetic polynucleotide
cagaactttagccaaagcgtttcaaacctgtttgaacagaaattcaaaaacaagctttaaaccctatttaaaccttccataaatggagattgatatgaatacaaacgtagttgaactaggcaatgcagaagcgaagcaaaccgacatattaatgcgcattcgtgcattaacagaatcgaaggctgtttcagcgtctcagattgcaaaagagatcagcgtatcacctgccacgctaagccaaatcttgaacggttcataca

SEQ ID NO: 14 - DNA, 260 bp, Artificial Sequence
  Description of Artificial Sequence: Synthetic polynucleotide
agattggcacagagctgacatcgttgcagagctacgaaaacgcaatatgtcactagctgaattgggaagatctaatcatctttcgtcttcaacattaaaaaatgctttggataagagatatccgaaagcggagaaaatcattgcagatgcactgggaatgacaccgcaagatatttggccgtctcgatactaggtgcgctatgaaagaatggtatacagcaaaagagttgctcggtttggcaggtttaccaaagcaagcc

SEQ ID NO: 15 - DNA, 260 bp, Artificial Sequence
  Description of Artificial Sequence: Synthetic polynucleotide
agactggcatcgggctgacatcgttgctgagttacgaaaacgcaatatgtcactggccgaattgggaagatcgaatcatctttcgtcttcaacattaaaaaatgctttagataagagatacccaaaagcggaaaaaatcattgcagatgcattgggaatgacaccgcaggatatctggccatctcgatactaggtgcgctatgaaagagtggtatacagcgaaagaattgcttggttttgctggtttgccaaagcaagca

SEQ ID NO: 16 - DNA, 260 bp, Artificial Sequence
  Description of Artificial Sequence: Synthetic polynucleotide
gagctgagctacagcacactcaaatctgcgttagacaaatcttatccaaaatgtgaacgaatcattgcgaatgcaattggcgtaccgcctgaagttatatgggctgagcgatttgcacaacgtaattttcgtccaaaattaattgataagttttaatcataaacaacttttacgttaaatgaaagagaaaaggaacgtttatgagtaacttaaaaataaaaacgcactactctgcaatggagattgcctcatttaagtta

SEQ ID NO: 17 - DNA, 260 bp, Artificial Sequence
  Description of Artificial Sequence: Synthetic polynucleotide
accaaggggattcgcgggaacgcttcagctttcgagttcgagatcggaagcacccggtagtcctgaccagccaactggcccccgtcgcaaggcgggggcttcttcatgtccaatgacgcgcgactccccagggccgtactctcgaaccatgagcgccaacattggggaacgactccgggatgttcgtaagcgccgggggatgagtcaacgcgagctggccgagcggtccggcctgtccatctcgctgatccgtaagctgg

SEQ ID NO: 18 - DNA, 260 bp, Artificial Sequence
  Description of Artificial Sequence: Synthetic polynucleotide
gccagccaggacgacttgttaacccttcagtccaccttgaatgacgcggtcactctgctggcccagttctacaaagggaacctggaaagtgaggaagtgatggccggcctgaccactgccatgggccagctggctggacatcgctgtaacgtcgagaaagcgccggcaccggagctgggcttgtttgttggaggtgacgaatgagccaggactggtttacggcgaaagagttggctgggctgagtggtatgcctggcact

SEQ ID NO: 19 - DNA, 260 bp, Artificial Sequence
  Description of Artificial Sequence: Synthetic polynucleotide
aaaatatatttaaaacagttaattgaaaattttaaccttgataaagattattttaagtaaaataaaaagagtaggaaaatccagtttatattcctattaatatatatacagttatatttaggtatatataaactagaaataataaaggctaggtattccctagcctttatataattcaatttatatacacttttctttagtttccaatatgtcttttctatataacttatgtgcatcaggagcagttgaaaaatccccct

SEQ ID NO: 20 - DNA, 260 bp, Artificial Sequence
  Description of Artificial Sequence: Synthetic polynucleotide
catttcgatgagcaggttaagtcgtgaaaacggtctagcgtcgacaactcttgcaaatgcccttgatcgcccttggcctaaaggtgaaaaaattatagctaaggctctagatttaaaccctagcgaaatatggcctagtcgctatgcagaattaagaaatgcggggtaaccacatggaatggttcgtcgtaagagatctcatgggattttctgggttaccaacaacagagcgtggaattcgaaaattagttgaaaactta

SEQ ID NO: 21 - DNA, 60 bp, Artificial Sequence
  Description of Artificial Sequence: Synthetic oligonucleotide
gtggataaagactggaatggattggccgatttaatagcaaatcttattacaaagtatgct

SEQ ID NO: 22 - DNA, 260 bp, Artificial Sequence
  Description of Artificial Sequence: Synthetic polynucleotide
cgtcgtcgccccgctccgcgaacggctcatcaggtacggcgtgccgacggtcgaggcgggcggcgtatgggccaaccaggaagggccggtaagcgtcacggcacgcgccgactgagagacgtttccgcaggtcaaccccgttccagcccaacagtgttagtctttgctcttacccagttgggcgggatagcctgcccggcatgagcgtgaaggttgaaggcatggtcattctggcaggcggctacgaccgacagtcggcg

SEQ ID NO: 23 - DNA, 260 bp, Artificial Sequence
  Description of Artificial Sequence: Synthetic polynucleotide
acacgtaccgctgcccgtggacgggggccgaacggcttccctgaacggccgacgaaggcgcaccgctcagcgtctcccccagggcgccgggcggggcgttttcccaggtcagcgcgtactacccaactgttgtagactttggctttacccagttgggtcggctaacctcaaacctcatgacacaagggacggtcagcggcatgaccattcacgcggcaggatacgaccggcagtcggcggagcgcgacagtgggagcgcg

SEQ ID NO: 24 - DNA, 260 bp, Artificial Sequence
  Description of Artificial Sequence: Synthetic polynucleotide
ggttacacgacgcccctctatggcccgtactgacggacacaccgaagccccggcggcaaccctcagcggatgccccggggcttcacgttttcccaggtcagaagcggttttcgggagtagtgccccaactggggtaacctttgagttctctcagttgggggcgtagggtcgccgacatgacacaaggggttgtgaccggggtggacacgtacgcgggtgcttacgaccgtcagtcgcgcgagcgcgagaattcgagcgca

SEQ ID NO: 25 - DNA, 60 bp, Artificial Sequence
  Description of Artificial Sequence: Synthetic oligonucleotide
agcgtgaactgggtgcgggcgcggtcaaggttgtggtcggggcgggcggtgtggaaatag

SEQ ID NO: 26 - DNA, 260 bp, Artificial Sequence
  Description of Artificial Sequence: Synthetic polynucleotide
tactgtcggctcacagcaccggtcggcagtaaggtcgagaagccccgtccgtgcgtctccccccgtggcgccggacggggcttcagacgtttcgggtgctgggttgttgtctctggacagtgatccatgggaaactactcagcaccaccaatgttcccaaaagaaagcgcaggtcagcgcccatgagccaagatctaggcatgtcgcccttcatcgctcccgacgtccctgagcaccttctagacactgttcgcgtcttc

SEQ ID NO: 27 - DNA, 260 bp, Artificial Sequence
  Description of Artificial Sequence: Synthetic polynucleotide
gtcgtggccgtccatagtccgcaacgcggtagggaggggacggtgcaggagctccctcaggtcgatgatgacgtctgattcgggggccgggccgtgcccgtacccgaacgagacgacggtgcaacgcggcatgggggacattagccctcccactttcggccgcaggtctgacagcgggtgacgatcgggccgcccgccgtttggatagtgacccacgtgtggcccgggtcggtgcagcggtccgctgctacggctacgct

SEQ ID NO: 28 - DNA, 260 bp, Artificial Sequence
  Description of Artificial Sequence: Synthetic polynucleotide
gtccgtgcgtcgttcccccgtggcgcatgggcggggcttcgctatgtccgtgcgcggtaccctgggctagccccgatcggctgtctgtccgcaaacacactgccggtcggggttttcgctggtcaggcgcacctatgtcgtgtagttgaagcgaggcaaacgactacgcaacataggtggggtccgctaggatcatgctcatgcggacagacacgttggcgacggcaactgagattgccgccggaaggacacccatgcga

SEQ ID NO: 29 - DNA, 260 bp, Artificial Sequence
  Description of Artificial Sequence: Synthetic polynucleotide
gtttccctgccccgtccgtgcgtgcctcccccgtcgcgcatgggcggggctccgtcgtaccctgggcttgccccgatcggctgtctgtccgcaaacacactgccggtcggggttttcgctggtcaggcgcacctatgtcgtgtagttgaagcgaggcaaacgactacgcaacataggtgctctcggctaggatcatggccatgcggacagacacgttgacgacagcgaccgaagttgctgccggaaggaagcccatgcga

SEQ ID NO: 30 - DNA, 260 bp, Artificial Sequence
  Description of Artificial Sequence: Synthetic polynucleotide
aacgggccggacgcgatcgaggctgccatcgaggccgccctcgccgaggctgacgcgtagccacctcgcaccctgtctccccctttaaacgcactgtcccacaacagtgagcgcaaagggggagatccgccgggcgtcgcggacgcccccgacatggaacagagaacggccccggtacctcgcggaaggtaccggggccgctccatgtggcccaccgcgccgcacgggggggaacggacagcggcgggccggtcaccctt

SEQ ID NO: 31 - DNA, 260 bp, Artificial Sequence
  Description of Artificial Sequence: Synthetic polynucleotide
tttcccctgccccgtccgtgcgtgcatcccccgtcgcgcatgggcggggcttcgtcgtaccctgggcttgccccgatcggctgtctgtccgcaaacacactgccggtcggggttttcgctggtcaggcgcacctatgtgccgtagttgaagcgagcatttgggctacgcaacataggtgctctccgctaggatcatgcccatgcggacagacacgttggcgacggcgactgaggttgccgccggaaggacacccatgcga

SEQ ID NO: 32 - DNA, 260 bp, Artificial Sequence
  Description of Artificial Sequence: Synthetic polynucleotide
  modified_base (114)..(177): a, c, t, g, unknown or other
aggatctcggaacaactgtaaataaaatatctggaggtgtacttatgagcagcactgaaactcaggaagaaaaagaacgtcaggagcaagttcaggaattgcaacggctactgnnnnnnnnnnnnnnnnnnnnnnnnnnnnnnnnnnnnnnnnnnnnnnnnnnnnnnnnnnnnnnnngtatgtgaactaagtatagccccatggaggggctatttctttttgatggaggaattatgaagaaaaactttaagatgcccgga

SEQ ID NO: 33 - DNA, 260 bp, Artificial Sequence
  Description of Artificial Sequence: Synthetic polynucleotide
aggatgttaaatcaaattgaatacagtgtttgcctgatgatgttgaatcagttgttggaagcgaagcagatcacgaaaaaagaatatgacaaagttaaaattagcttaatgaaggagtatcaaatatcttctgaaatattaagtggataagtgaaaagagttcgggtagtatgtgtgctaagaaagaggtggtgagatatatggctaaagtagaaatcattaaagccaataaagaactgtcgaatcgcaataagaaaggt

SEQ ID NO: 34 - DNA, 260 bp, Artificial Sequence
  Description of Artificial Sequence: Synthetic polynucleotide
aagagtaaatggattgatggaaaaaaggagtggtaaggctccttgcactacaaaaacatttgcaggagaaactatgagaaaaagaacattaacttgccgatacgagccagatgaattagcggaacaacatctagcagacgcctatgagctgttattaaggtatgcggtaaaaaaaaacaatgaaaaggagataaagaaaaatgataacagtggccttatatgcaagagtttcatcgaagagtcaagcgcagaacaataca

SEQ ID NO: 35 - DNA, 260 bp, Artificial Sequence
  Description of Artificial Sequence: Synthetic polynucleotide
ctcgccccccgggtctgtcgcaacaaggaatgcgccgcgttcggctccgacgtcatttagacactgaggtgcacgccacagtgtgtaaacgacgtcgctccggggtcgcctagttgacctgcggaaacggcgcggccccgcctcccatcatgggacgcggggccgcgctgcgcatgttcactcggcgaggtcggacgcgaacgacgtgaacgacgaccaggccgccggcgccacggtgagcatccctgcgccgtgatcct

SEQ ID NO: 36 - DNA, 60 bp, Artificial Sequence
  Description of Artificial Sequence: Synthetic oligonucleotide
acctcaattttgctcaaaaacggcattgaactacgattttcgtacaaaaccgccgaataa

SEQ ID NO: 37 - DNA, 260 bp, Artificial Sequence
  Description of Artificial Sequence: Synthetic polynucleotide
aagcacattcccggcccggggccgctggtctgccccgacggaaaatgccagcgcgcttgattgtttccgggcctgctgccaccctctgaccaagcaacggaccatcgagccggaggggatccgccgtgcacagatgctcccctttagagccaccgtcccacgacaggggctctaaaggggagcgacacgagatggttgcttgacctgcggaaacacgacggccccgcctcccagccagggacgcggggccgttgccgtgc

SEQ ID NO: 38 - DNA, 260 bp, Artificial Sequence
  Description of Artificial Sequence: Synthetic polynucleotide
attattaacgaaccgttgggccaggagagtggcagcggcgggtttgctatggagttctgatgaagaagcgcacctacaaaaacaaacacactgccagcagtggcagtgccggacagcctgatatctctgacgctctcagaagcgatccggcgctcagcgccttcacgtttgacgggccatattcagtaacagacggctatgatctgctggacagcatgtgctgcgtcgataacggtcggtactacgagacgccaatagac

SEQ ID NO: 39 - DNA, 260 bp, Artificial Sequence
  Description of Artificial Sequence: Synthetic polynucleotide
gccgcgcccgcgggggtcgggtgcggcgcggccgtcagggggcgaccaactcgatcttgatcgcgagggcgccgagcgcttccttttcgggcccgtagatgttgcggatgttggcgagctgctgctcgcgggtcgacgtcgggttgacgttggccggcccctcgccgtcgagcagagcctcgaagtcggggtactccgtcacctgcttcacgagcacgtcgcaggtctcgtcggtgcccttgatcctgaagcggatcacg

SEQ ID NO: 40 - DNA, 260 bp, Artificial Sequence
  Description of Artificial Sequence: Synthetic polynucleotide
aacgcgaaacacaaccgggagtaccggagacgacaacggaaacagccggctaaccccgctgagtgaccagacccccgtccatgaggcgggggtttcgtcgtttgcccaggtcagcggtaggtgtaccctgtgggggagccatcaaggacgcacccccacgggggtaacatccactcatgacactaggagtagtgaccggtatggacacccacgccggagtgtacgcacgccagtccaagcggcgggccaacaaatcggag

SEQ ID NO: 41 - DNA, 260 bp, Artificial Sequence
  Description of Artificial Sequence: Synthetic polynucleotide
ggtccggccacggcacataaggccatggggttctacgtgatgggtggccagtgcgctaacccgcgctgcccctgcaatacggctggtcggctgcatggtcctttgatcccccattttgagaagtgagttatcaagggtccatagacgcgctaccctaaaggggctggtcaagcgtgccagcaaccctaggaggggacagcgtgacagggagaagagccgactaccagacactagtcagtctggggctcagcgaagacgac

SEQ ID NO: 42 - DNA, 260 bp, Artificial Sequence
  Description of Artificial Sequence: Synthetic polynucleotide
gcccggaaggacgaaccggccgaggtcgacgaccgcgccgacggggaaaccctgttctgaccagggcttttttatttgcccctttagaaccacagttccacaactgtgagcctaaaggggcatccccacccttgggcggcgacgacctcgccgagcaggacgcggccccggtacctcgcggaaggtaccggggccgttccttatggcccaccgcgccgcacgggggatgacggcagcggtgggcccttcccccccctacc

SEQ ID NO: 43 - DNA, 260 bp, Artificial Sequence
  Description of Artificial Sequence: Synthetic polynucleotide
gcccgcagggacgagccggccgaggtcgacgaccgcgccgacggcgaaaccctgttctgaccagcccttttttatttgcccctttaggcgcactgttccacgactgttcgcctaaaggggcatccccgccagggactcgacgacgccctcgccgagcagacagcggccccggtacctgaccaggtaccggggccgttccgttccggcccgccgcgccgctcgggggatacggcgacggcgggcctccccgctaccgtctc

SEQ ID NO: 44 - DNA, 260 bp, Artificial Sequence
  Description of Artificial Sequence: Synthetic polynucleotide
aatatactaagtgttaagtttaaaaatggcttagttacagaatttatctataacaattaaccatgtcaaaaattcttctttactcataccatttgacaaccccaagtttcaataaagaatgtacctttttgattcttatctgaatgtattgtatttactatattgttcaacatttattcctccatttattttaaaatatttttgtatctattaatataaatactataccataaactataggataaaaaaatatccttatt

SEQ ID NO: 45 - DNA, 260 bp, Artificial Sequence
  Description of Artificial Sequence: Synthetic polynucleotide
tcctgcgggtcaagaccatttcgcctgacaaacagcctacatagaaaaagcgccgcgaggcgcttttttcgtttacgcgctcccctgaccgagttgtctgataatatattttcggacacgctcggcaacccgaacgagagtcaaaatacatttgcgatgtgccggcgcatcgcctgattttacgcacttccgaacccgtcatggcgaagaaaccgaaagccaaggtctacagctatctacgcttctccgatccgaagcag

SEQ ID NO: 46 - DNA, 260 bp, Artificial Sequence
  Description of Artificial Sequence: Synthetic polynucleotide
gtgccgacacctcggactcgtggttcgccttggcgcggatcggctgacaaagaaacccccctctcagggccttcgggctccgggaggggggcttttttgcgtttcagggcatcaatggtgatgatgtccgtgaccgtgtccgtggtcagcaccatcatccgatggtacaacctcgacaatcgcggtctcagtcgtttaggatgtaccacatgccatcgaagagagccttgctggtcatccggctcagccgggtgacggat

SEQ ID NO: 47 - DNA, 260 bp, Artificial Sequence
  Description of Artificial Sequence: Synthetic polynucleotide
cgtgtaactagcataaaatttaaaaatggaattaacttaaactttatatacaacacataaaccttcatatctccacattttaaactcttccgtacttacactaatggacaaccccaagtacaaatatagaaggttttttctttagttcgttttgtatttttatttatgttaattttaatatttttatccatataaagttcctccaataattaaatagatttcttaaatttctacagtattatagcataacaaatatataa

SEQ ID NO: 48 - DNA, 260 bp, Artificial Sequence
  Description of Artificial Sequence: Synthetic polynucleotide
taggcatgacgactcccgtcaatcccgctgggttggtgacgtccacgctacgcagtccagggggcgggaacgggcttgagcgcacggcaactttcctgggaaacggactgacccggacacgttggacatgctagaactgtcgttcacgcgcctccggaaacccgaaggtgctcaactgacagttcaggagagccctacccgtgtcggcaacagcccaggtcagcgccacgtcaccgactcccttcatggcgggcatgacg

SEQ ID NO: 49 - DNA, 147 bp, Artificial Sequence
  Description of Artificial Sequence: Synthetic polynucleotide
ggacgtcataacagtgaagctattgtatttgctttcgccaatctgcagattaaaaggtaaggattacttaatgtatcggtgtcttatgtttaattttttgcagtatatagatactgtatgtctttacaaaacttcatctacatctag

SEQ ID NO: 50 - DNA, 260 bp, Artificial Sequence
  Description of Artificial Sequence: Synthetic polynucleotide
tggcaggcagccgaggaactagcctctcacgacatcccgcttccgcaggccgccgaatagcatcgaaatattctcaatcactcaacaccatttttctcgattgcagtacaatcgaggctcgatcaacgcacgagagtgccaaggagagaggagtgaacgagaaacttgcgcgggccgtcatcgacgcggcccgagactttgcccttacagggagcggcttcgacgcgatgtgccgcgcgatcgaagcctacgagacgcag

SEQ ID NO: 51 - DNA, 260 bp, Artificial Sequence
  Description of Artificial Sequence: Synthetic polynucleotide
cctcggactcgtggttcgccttggcgcggatcggctgacaaagaaacccccctctcagggccttcgggctccgggaggggggcttttttgcgtttcagggcatcaatggtgatgatgtccgtgaccgtgtccgtggtcagcaccatcatccgatggtacaacctcgacaatcgcggtctcagtcgtttaggatgtaccacatgccatcgaagagagccttgctggtcatccggctcagccgggtgacggatgcgacgacc

SEQ ID NO: 52 - DNA, 260 bp, Artificial Sequence
  Description of Artificial Sequence: Synthetic polynucleotide
cgctggcagctcgcgaacaggcccctgggcagttggtccgggggccttgcgcttgcccgcgagagaggcgagcagggcttccctctcctcctcggggagcgacatgagcatgtcggcaagccgctcgatcatgcgcgttccagcaggtcagacggcttcttgaccgtgagcgggagcatcttcccgccaggcggagccagttgtgggcttgttcccatctgcgggcagatggaaccacgcctacatccagtagtaccctg

SEQ ID NO: 53 - DNA, 260 bp, Artificial Sequence
  Description of Artificial Sequence: Synthetic polynucleotide
cgctggcagctcgcgaacaggcccctgggcagttggtccgggggccttgcgcttgcccgcgagagaggcgagcagggcttccctctcctcctcggggagcgacatgagcatgtcggcaagccgctcgatcatgcgcgttccagtaggtcagacggcttcttgaccgtgagcgggagcatcttcccgccaggcggagccagttgtgggcttgttcccatctgcgggcagatggaaccacgcctacatccagtagtaccctg

SEQ ID NO: 54 - DNA, 260 bp, Artificial Sequence
  Description of Artificial Sequence: Synthetic polynucleotide
tggagtgtcgtgcgcagcttcgagtttcatcccgtgtgggagcccgacccctggtcttgaccgctggagcgcaaaccatgcaggcgcgcttgattgtttctccgcctgctgccaccctctgaaaaccgcacctcagtgcagggagagggggaacgatgctcgcgagtcctttagagacactgacccacgtcagtggatctaaaggaccacatcggagcgcgaagaacggccccggtacctacctcaggtaccggggccgt

SEQ ID NO: 55 - DNA, 260 bp, Artificial Sequence
  Description of Artificial Sequence: Synthetic polynucleotide
tggagcctggtgcgtacctacgagttccaccccgtgtgggagcccgacccctggtcttgaccgctggagcacaaaccatgcaggcgcgcttgattgtttctgtgcctgctgccactctctgaaatccgcacctcagtgcagggagagggggaacgatgctcgcgagtcctttagagccactgacccatgacagtggatctaaaggacgcaaccaccgcaggtggcagtacgagaacggccccggtaccgagcaggtaccg

SEQ ID NO: 56 - DNA, 260 bp, Artificial Sequence
  Description of Artificial Sequence: Synthetic polynucleotide
cgctggcagctcgcgaacaggcccctgggcagttggtccgggggccttgcgcttgcccgcgagagaggccagtagggcttccctctcctcctcggggagcgacatgagcatgtcggcaagccgctcgatcatgcgcgttccagcaggtcagacggcttcttgaccgtgagcgggagcatcttcccgccaggcggagccagttgtgggcttgttcccatctgcgggcagatggaaccacgcctacatccagtagtaccctg

SEQ ID NO: 57 - DNA, 260 bp, Artificial Sequence
  Description of Artificial Sequence: Synthetic polynucleotide
cgctggcagcgtgcgacaaggcccctgggcggttggtccgggggcctcacgcttgcccgcgagagaggcgagcagggcttccctctcctcctcggggagggccatgagcatgtcggcaaggcgctcgatcatgcgcgttccagcaggtcagacggcttcttgaccgtgagcgggagcatcctcccaccaggcggagccagttgtgggcttgttcccatctgggggcagatggaaccacgcctacatccagtagtaacctg

SEQ ID NO: 58 - DNA, 260 bp, Artificial Sequence
  Description of Artificial Sequence: Synthetic polynucleotide
gcgacaaggaccctggtgagttggtccaccgggctcacgctggaccgcgagagaggcgaggagagcttccctctccccctcgggcagggccatcaggctctccgccaggcgctcgaccacgtcgcgcttcatgcgcgttccagcaggtcagagggcttcttgaccgagagcgggagcatcttcccgccaggcggtgccagttgtgggcttgttcccatctgggggcagatggaaccacgcctacatccagtagtaccctg

SEQ ID NO: 59 - DNA, 100 bp, Artificial Sequence
  Description of Artificial Sequence: Synthetic polynucleotide
acccctatcctaaggtttaatttcatttttgacctcacagccactaatagtttccactaagaaaagtagtaagtatcttaaaaaacagataaagctgtat

SEQ ID NO: 60 - DNA, 260 bp, Artificial Sequence
  Description of Artificial Sequence: Synthetic polynucleotide
gtagcgggagagcgttttgagcaatccccccagattattttgggccgtttcgtagcatagatttctttcaggaacgctacacactaagtcataacgcataatttcaatgacttatggtgagatcaataatcccgcctactgcattccgacaaggccagatcggaaggcatacacatccagacggtgattggcagcttccagtaagcaaccgcctcactgataaggtattcgtgtttcaggcagccggccggattgacctt

SEQ ID NO: 61 - DNA, 260 bp, Artificial Sequence
  Description of Artificial Sequence: Synthetic polynucleotide
cccgccgatgacgcccaggaggacgctgcccgctgtatccgggcacgccacggccctggtcccgcgctcccccgtgatgtcccacgtcaggaccacgcccgcctcacgcactggatgcccggagaccgtttctcctccacatcgggcccctgtctgtccctggatgtccgtcaagtccaccctgtcaccccttgtgacgcgtgtctgaggagatatccgctcccgccgaacttcccccaaacacacatcaggcccgctac

SEQ ID NO: 62 - DNA, 260 bp, Artificial Sequence
  Description of Artificial Sequence: Synthetic polynucleotide
gagcagagcctccctctcctcctcgggtagggccatgagctggtctgccagccgcttgatggtcgcgccgttcatgcgcgttccagcaggtcagagggcttcttgaccgagagcgggagcatcttcccgccaggcggtgccagttgtggccatgtatccatctgggggcagatggagacaaggtcacatccagtgatagcttgctcaccatgagcagccggaagcgacagccagccgcagagcgcgcggcctacaacatc

SEQ ID NO: 63 - DNA, 260 bp, Artificial Sequence
  Description of Artificial Sequence: Synthetic polynucleotide
gagcagagcctccctctcctcctcgggtagggccatgagctggtctgccagccgcttaatggtcgcgccgttcatgcgcgttccagcaggtcagagggcttcttgaccgagagcgggagcatcttcccgccaggcggtgccagttgtggccatgtatccatctgggggcagatggagacaaggtcacatccagtgatagcttgctcaccatgagcagccggaagcgacagccagccgcagagcgcgcggcctacaacatc

SEQ ID NO: 64 - DNA, 260 bp, Artificial Sequence
  Description of Artificial Sequence: Synthetic polynucleotide
gcgcgagaagcgaagccggaaccccttccgaagcggcgtcgactgaagaaggtggacagcgcagccgtccgccagtgggccaacgagaacggcgtcgaggtcccggctactgggcgaatcgcgcgggccgtggtcgagcagtacgaggcagcacagcagggctgagtagtgctacctgaaggacacgctggtcgagcaacgtgcgtgaggtagcagaagccggtaccctgctgagcgtgacgacatcggtactcgaacag

SEQ ID NO: 65 - DNA, 74 bp, Artificial Sequence
  Description of Artificial Sequence: Synthetic oligonucleotide
gacaccatggaagtagtcataaagccattttgcactaataaaaaaaaaggcgctctttaatgtagcgcccaaat

SEQ ID NO: 66 - DNA, 260 bp, Artificial Sequence
  Description of Artificial Sequence: Synthetic polynucleotide
ctccctctcctcctcgggtagggccatgagctggtctgccagccgcttgatggtcgcgccgttcatgcgcgttccagcaggtcagagggcttcttgaccgagagcgggagcatcttcccgccaggcggtgccagttgtggccatgtatccatctgggggcagatggagacaaggtcacatccagtggtagcttgctcaccatgagcagccggaagcgacagccagccgcagagcgcgcggcctacaacatcgacgccgag

SEQ ID NO: 67 - DNA, 260 bp, Artificial Sequence
  Description of Artificial Sequence: Synthetic polynucleotide
gtcggcgtgggttgccccgcaccccgccccgctgccgctgttcaccgcgccactggtggagttcgagtttcacggcgcgcttgtgttcctgacaaccccggacgtgctggcgctgatcgcgtcggcaatcatgcttgttcggttcgttgcgtgggcaattcagcccgtcacccgccgcctgaaggggaaaggggcctgccgtgaatgcaatgaccgcgattgaacatcgcccggccgaaatcaccccggccgaggcccgc

SEQ ID NO: 68 - DNA, 260 bp, Artificial Sequence
  Description of Artificial Sequence: Synthetic polynucleotide
gtcggcgtgggttgccccgcaccccgccccgctgccgctgttcaccgcgccgctggtggagttcgagtttcacggcgcgcttgtgttcctgacaaccccggacgtgctggcgctgatcgcgtcggcaatcatgcttgttcggttcgttgcgtgggcaattcagcccgtcacccgccgcctgaaggggaaaggggcctgccgtgaatgcaatgaccgcgattgaacatcgcccggccgaaatcaccccggccgaggcccgc

SEQ ID NO: 69 - DNA, 260 bp, Artificial Sequence
  Description of Artificial Sequence: Synthetic polynucleotide
agggatcctgatgattttgagttaacacttcatcctaagattcttcaaaattattactgatatcccgatggttcatactcttctgtaccatggtgttatcaataataaaaaccaaactccttctatatatagtgtggagtttggttttttattatttattctttgaactccctcccttccctaaacccttgcttgaatgtttcagcagcaaggtttatacgggagttatacatgtcctccaattgaagcaactcttttaa

SEQ ID NO: 70 - DNA, 260 bp, Artificial Sequence
  Description of Artificial Sequence: Synthetic polynucleotide
cagcgctgactggacctacgccaagcacgccgacggctcgtacaagatggacggcaccaagcacgtctacaagtgccagcgccactgcggcggcggccgcggcaaggtcgagaccaccgatccgtggtgatctaaccccgcataccaagaaaccccctacccggcccgcgaaggctaggtagggggctttttgtgtttcagtgggtgtggccgtgatgacctgtgtcttcgtggtttgtctggtcaaccaccgcggtctc

SEQ ID NO: 71 - DNA, 260 bp, Artificial Sequence
  Description of Artificial Sequence: Synthetic polynucleotide
ggcggtgcaggagctgactggacctacgccaagcacgccgacggctcgtacaagatggacggcaccaagcacgtctacaagtgccagcgccactgcggcggaggccgcggcaagaccgagaccaccgatccgtggtgatctaaccacgcataccaagaaaccccctacctagccttcgcgggccgggtagggggcttttcttgttttcagtgggtatggccgtgatgacctgtgtcttcgtggtttgtctggtcaaccac

SEQ ID NO: 72 - DNA, 260 bp, Artificial Sequence
  Description of Artificial Sequence: Synthetic polynucleotide
aagaccgttcacaaaaacggcaaggaccacaaggtctacaagtgcgtccgtcactgcggcggaggccgcggcaagaccgagaccaccgatccgtggtgatctaaccccgcataccaatatggtcccttatcggacctattgacgcaaagaaaccccctacctagccttcgcgggccgggtagggggcttttcttgtttcagtgggtatggccgtgatgacctgtgccttcgtggtttgtctggtcaaccaccgcggtctc

SEQ ID NO: 73 - DNA, 260 bp, Artificial Sequence
  Description of Artificial Sequence: Synthetic polynucleotide
ccggcggagccagcgctgactggacctacgccaagcacgccgacggctcgtacaagatggacggcaccaagcacgtctacaagtgtgtccgtcactgcggcggaggccgcggcaagaccgagaccaccgatccgtggtgatctaacctcgcataccaagaaaccccctacccggcccgcgaaggctaggtagggggctttttgtgtttcagtgggtatggtcgtgatgacctgtgtcttcgtggtttgtctggtcaacca

SEQ ID NO: 74 - DNA, 260 bp, Artificial Sequence
  Description of Artificial Sequence: Synthetic polynucleotide
ggtcccggtgaagaacccggacggctctatcaagaaggtcctcaagaacggcaagctgaagaccgtgtacggctgcgaggtccgctgcggcggaggccgcggcaagaccgagaccaccgatccgtggtgatctaaccccgcataccaagaaaccccctacccggcccgcgaaggctaggtagggggctttttgtgtttcagtgggtgtggccgtgatgacctgtgtcttcgtggtttgtctggtcaaccaccgcggtctc

SEQ ID NO: 75 - DNA, 260 bp, Artificial Sequence
  Description of Artificial Sequence: Synthetic polynucleotide
cctctcgctggtcctctgggagggccatgaccatctcggccacgcgctccaccgctcccccgctcatgcgcgttctcgcaggtcagcaggctttttgaccgtgagcgggagcatcttcccgccagccggtgccagttgtggccatgtgtccatctgggggcagatggaaacgcagtcacaaccggtgtactgtcctcaccgtgagtgaccgagcgagtacctacgacatcgaggcggagtggagtccggccgacctcgcc

SEQ ID NO: 76 - DNA, 260 bp, Artificial Sequence
  Description of Artificial Sequence: Synthetic polynucleotide
ctctcgctggtcctcgggtagggccaagaccgtctcagccaggcgctccaggatctgtccgttcacgggcgttcccgcaggtcagagccctgtcggaccgtgagtgggagcatcttcccaccgggcggtgccagttgtggccatgtgtccatctgggggcagatggagacggggtcacatccagtggtaggttcctcgccatgagtaaccgactacatgagtacgacgtcgaggcggagtggagtccagccgacctcgcc

SEQ ID NO: 77 - DNA, 260 bp, Artificial Sequence
  Description of Artificial Sequence: Synthetic polynucleotide
gacccagaggtccagggaccacctggcgtggcctacagagcccacccaccggtcggcagagagcagatacgcgaagaccccccggtcgatgagtgactggggggtccttcgcttgtcggcacgctcagccttgtgatacttcgcgaacacgctggtcgcagaaggtgcgcgaggtatcactagcagctaccatggtcgacatgaccagctccgtcctcgaacagctccgccaggcgaagtccggcgcacccaagctgtcc

SEQ ID NO: 78 - DNA, 260 bp, Artificial Sequence
  Description of Artificial Sequence: Synthetic polynucleotide
aggagctgactggacctacgccaagcacgccgacggctcgtacaagatggacggcaccaagcacgtctacaagtgccagcgccactgcggcggaggccgcggcaagaccgagaccaccgatccgtggtgatctaaccacgcataccaagaaaccccctacccggcccgcgaaggctaggtagggggcttttcttgtttcagtgggtatggccgtgatgacctgtgtcttcgtggtttgtctggtcaaccaccgcggtctc

SEQ ID NO: 79 - DNA, 260 bp, Artificial Sequence
  Description of Artificial Sequence: Synthetic polynucleotide
gcaccaagcacgtctacaagtgccagcgccactgcggcggaggccgcggcaagaccgagaccaccgacccgtggtgatctaaccccgcataccaagaaaccccctacccggcccgcgaaggctaggtagggggctttttcgcgttcaggggacctgatcgctcagcgacccatctccgatgggatcgcgtttgtgtttcagtgggtatggccgtgatgacctgtgtcttcgtggtttgtctggtcaaccaccgcggtctc

SEQ ID NO: 80 - DNA, 260 bp, Artificial Sequence
  Description of Artificial Sequence: Synthetic polynucleotide
gaaccccgtgttcaacgacgacggctcgtacaagaccgttcacaaaaacggcaaagaccacaaggtctacaagtgcgttcggcactgcggcggaggccgcggcaagaccgagaccaccgatccgtggtgatctaaccccgcataccaagaaaccccctacccggcccgcgaaggctaggtagggggctttttgtgtttcagtgggtatggccgtgatgacctgtgtcttcgtggtttgtctggtcaaccaccgcggtctc

SEQ ID NO: 81 - DNA, 260 bp, Artificial Sequence
  Description of Artificial Sequence: Synthetic polynucleotide
aggagctgactggacctacgccaagcacgccgacggctcgtacaagatggacggcaccaagcacgtctacaagtgccagcgccactgcggtggaggccgcggcaagaccgagaccaccgatccgtggtgatctaaccccgcataccaagaaaccccctacccggcccgcgaaggctaggtagggggctttttgtgtttcagtgggtatggccgtgatgacctgtgtcttcgtggtttgtctggtcaaccaccgcggtctc

SEQ ID NO: 82 - DNA, 260 bp, Artificial Sequence
  Description of Artificial Sequence: Synthetic polynucleotide
gactggaccccggtcatgaactccgacggcacctacaagaccgttcacaaagacggtcaggaccacaaggtctacaagtgctcccgtcactgcggcggaggccgcgcccacaaagaggtcaccgaaacctactgacctcgcataccaagaaaccccctacctagccttcgcgggccgggtagggggcttttcttgtttcagtgggtatggccgtgatgacctgtgtcttcgtggtttgtctggtcaaccaccgcggtctc

SEQ ID NO: 83 - DNA, 260 bp, Artificial Sequence
  Description of Artificial Sequence: Synthetic polynucleotide
gaaccccgtgttcaacgacgacggctcgtacaagaccgttcacaaaaacggcaaagaccacaaggtctacaagtgtgtccgtcactgcggcggaggccgcggcaagaccgagaccaccgatccgtggtgatctaaccccgcataccaagaaaccccctacccggcccgcgaaggctaggtagggggcttttcttgtttcagtgggtatggccgtgatgacctgtgtcttcgtggtttgtctggtcaaccaccgcggtctc

SEQ ID NO: 84 - DNA, 260 bp, Artificial Sequence
  Description of Artificial Sequence: Synthetic polynucleotide
gaaccccgtgttcaacgacgacggctcgtacaagaccgttcacaaaaacggcaaggaccacaaggtctacaagtgcgtccgtcactgcggcggaggccgcggcaagaccgagaccaccgatccgtggtgatctaaccccgcataccaagaaaccccctacccggcccgcgaaggctaggtagggggcttttcttgtttcagtgggtgtgtccgtgatgacctgtgtcttcgtggtttgtctggtcaaccaccgcggtctc

SEQ ID NO: 85 - DNA, 260 bp, Artificial Sequence
  Description of Artificial Sequence: Synthetic polynucleotide
actgtaaccgctacgtcggcgggttcggatcactgggccagcatcttcgtgccgttctgatcaccagagggtcgcgtcgcgccactgcggcggaggccgcggcaagaccgagaccaccgatccgtggcgatctaaccccgcataccaagaaaccccctacctagccttcgcgggccgggtagggggcttttcttgtttcagtgggtgtggccgtgatgacctgtgtcttcgtggtttgtctggtcaaccaccgcggtctc

SEQ ID NO: 86 - DNA, 260 bp, Artificial Sequence
  Description of Artificial Sequence: Synthetic polynucleotide
aagtgggtcccggtgaagaacccggacggctctatcaagaaggtcctcaagaacggcaagctgaagaccgtgtacggctgcgaggtccgctgcggcggaggccgcgcccacaaagaggtcaccgaaacctactgacctcgcataccaagaaaccccctacctagccttcgcgggccgggtagggggctttttgcgtttcagtgggtgtggccgtgatgacctgtgtcttcgtggtttgtctggtcaaccaccgcggtctc

SEQ ID NO: 87 - DNA, 260 bp, Artificial Sequence
  Description of Artificial Sequence: Synthetic polynucleotide
aagtgggtcccggtgaagaacccggacggctctatcaagaaggtcctcaagaacggcaagctgaagaccgtgtacggctgcgaggtccgctgcggcggcggtcgccacgccaaagaggtcaccgaaacctactgacctcgcatactaagaaaccccctacccggcccgcgaaggctaggtagggggctttttgcgtttcagtgggtatggccgtgatgacctgtgtcttcgtggtttgtctggtcaaccaccgcggtctc

SEQ ID NO: 88 - DNA, 260 bp, Artificial Sequence
  Description of Artificial Sequence: Synthetic polynucleotide
ggccttccggcctcgcctctcggctctttctccagaggcagcccgcggcgctgacgctgccggtggaagttgcacagccctttggaatggtgagggcggccgcagccctcgacttcgcaatcccccattgatcaatggtacaaaacagccccctcccgggaatccgtttggactcctgagagggggctttttgcgtttcagtgggtatggccgtgatgacctgtgtcttcgtggtttgtctggtcaaccaccgcggtctc

SEQ ID NO: 89 - DNA, 260 bp, Artificial Sequence
  Description of Artificial Sequence: Synthetic polynucleotide
gttctgatcaccagagggccgcgtcgcgccactgcggcggaggccgcggcaagaccgagaccaccgatccgtggtgatctaaccccgcataccaagaaaccccctgcccggcccgcgaaggctaggtagggggctttttcgcgttcagggggtctgatcgctcagcgacccatctccgatgggatcgcgtttgtgcttcagtgggtgtggccgtgatgacctgtgtcttcgtggtttgtccggtcaaccaccgcggtctc

SEQ ID NO: 90 - DNA, 260 bp, Artificial Sequence
  Description of Artificial Sequence: Synthetic polynucleotide
ggctgtacgaggcgggcaaccggatcgctacgatcgccacgtcggcgagcgactggcgctcgatccggaacatctgcctgatcctgcgccgcctcgggatcgacgtccgacgtcgaagctgaggctcagccttgtgatacctcacgaacacgctggtcgaggagggtgcgtgaggtatcacaagatggtaccctggtggggtgaccagctctgtgctcgaccagctccgccaggcgaagaccggaccagctccgaaggag

SEQ ID NO: 91 - DNA, 260 bp, Artificial Sequence
  Description of Artificial Sequence: Synthetic polynucleotide
ggcaagcagggcttccctctcctcctccgggagggccatgagcatgtcggcaaggcgctcgatcatgcgcgttccagcaggccagacggcttcttgaccgtgagcgggagcatcttcccgccaggcggagccagttgtgggcttgttcccatctgggggcagatggaaccacgcctacatccagtagtaccctgctcaccatgagtgcgcgcgactacgacatcgaagctgagtggacaccggccgacctcgccctgctg

SEQ ID NO: 92 - DNA, 260 bp, Artificial Sequence
  Description of Artificial Sequence: Synthetic polynucleotide
ggcgagcagggcttccctgtcctcctccgggagggccatgagcatgtcggcaaggcgctcgatcatgcgcgttccagcaggtcagacggcttcttgaccgtgagcgggagcatcttcccgccaggcggagccagttgtgggcttgttcccatctgcgggcagatggaaccacgcctacatccagtagtaccctgctcaccatgagtgcgcgcgactacgacatcgaagctgagtggacaccggccgacctcgccctgctg

SEQ ID NO: 93 - DNA, 260 bp, Artificial Sequence
  Description of Artificial Sequence: Synthetic polynucleotide
ggcgagcagggcttccctctcctcctcggggagcgacatgagcatgtcggcaagccgctcgatcatgcgcgttccagcaggtcagacggcttcttgaccgtgagcgggagcatcttcccgccaggcggagccagttgtgggcttgttcccatctgcgggcagatggaaccacgcctacatccagtagtaccctgctcaccatgagcgcgcgcgactacgacatcgaagctgagtggaccccggccgacctcgccctgctg

SEQ ID NO: 94 - DNA, 260 bp, Artificial Sequence
  Description of Artificial Sequence: Synthetic polynucleotide
ggcgagcagggcttccctgtcctcctccgggagggccatgagcatgtcggcaaggcgctcgatcatgcgcgttccagcaggtcagacggcttcttgaccgtgagcgggagcatcttcccgccaggcggagccagttgtgggcttgttcccatctgggggcagatggaaccacgcctacatccagtagtaccctgctcaccatgagtgcgcgcgactacgacatcgaagctgagtggacaccggccgacctcgccctgctg

SEQ ID NO: 95 - DNA, 260 bp, Artificial Sequence
  Description of Artificial Sequence: Synthetic polynucleotide
ggcgagcagggcttccctctcctcctcggggagagacatgagcatgtcggcaagccgctcgatcatgcgcgttccagcaggtcagacggcttcttgaccgtgagcgggagcatcttcccgccaggcggagccagttgtgggcttgttcccatctgcgggcagatggaaccacgcctacatccagtagtacgctgctcaccatgggtgcacgcgactacgacatcgaagctgaatggacaccggccgacctcgctctgctg

SEQ ID NO: 96 - DNA, 260 bp, Artificial Sequence
  Description of Artificial Sequence: Synthetic polynucleotide
cgtgttcaacgacgacggctcgtacaagaccgttcacaaaaacggcaaagaccacaaggtctacaagtgcgttcggcactgcggcggaggccgcggcaagaccgagaccaccgatccgtggtgatctaaccccgcataccaagaaaccccctacccggcccgcgaaggctaggtagggggcttttcttgtttcagtgggtatggccgtgatgacctgtgtcttcgtggtttgtctggtcaaccaccgcggtctcagtggt

SEQ ID NO: 97 - DNA, 161 bp, Artificial Sequence
  Description of Artificial Sequence: Synthetic polynucleotide
cctactgtgtttttaaaaataagtatggaaactcctgataaaaagtggtattctctagttagttaaatatagcaccatgtactgagaaagggaatacgccgatgataaagaatcttgagaacatacaccatgtagctatataccttaggattagtcaggag

SEQ ID NO: 98 - DNA, 260 bp, Artificial Sequence
  Description of Artificial Sequence: Synthetic polynucleotide
aaagaatggttgaagcctgagcaatttgaacttgaagttatcttgcggttccctacataggggaccgttctgtatatatgtcggtgggttatactgattgaactccccaagatatatacggactaaccttaaaaataacttacttcttattatattcatcacaaactgattatgtagcaatatccactacatcttctacaggtatccaccaaaaatcctcatcattctttaacttaatttgtttatacgttgagtcaaac

SEQ ID NO: 99 - DNA, 260 bp, Artificial Sequence
  Description of Artificial Sequence: Synthetic polynucleotide
gtgaagaacccggacggctctatcaagaaggtcctcaagaacggcaagctgaagaccgtgtacggctgcgaggtccgctgcggcggaggccgcgcccacaaagaggtcaccgaaacctactgacctcgcataccaagaaaccccctacccggcccgcgaaggctaggtagggggctttttgtgtttcagtgggtatggccgtgatgacctgtgtcttcgtggtttgtctggtcaaccaccgcggtctcagtggtgtacgg

SEQ ID NO: 100 - DNA, 260 bp, Artificial Sequence
  Description of Artificial Sequence: Synthetic polynucleotide
acctacgccaagcacgccgacggctcgtacaagatggacggtaccaagcacgtctacaagtgtgtccgtcactgcggcggaggccgcggcaagaccgagaccaccgatccgtggtgatctaacccccgcataccaagaaaccccctacccggcccgcgaaggctaggtagggggcttttctcgtttcagtgggtgtggccgtgatgacctgtgtcttcgtggtttgtctggtcaaccaccgcggtctcagtggtgtacgg

SEQ ID NO: 101 - DNA, 260 bp, Artificial Sequence
  Description of Artificial Sequence: Synthetic polynucleotide
ccagattattgatgaggatatttttgcaaaggcacaggaaatcagagaacataatgtgagaagtcaaaatcgcataggaatttatagacctcacccaaaagcagaaatcggagcttttaagattagaaagacagaagaaaaatataaggatccatataagcaggcagagtatgcatatagtcaaatattggaggtagcaaatgaatgagaacgtaacattgatacctgccagaatacgagctggtaatcgaataacaagg

SEQ ID NO: 102 - DNA, 260 bp, Artificial Sequence
  Description of Artificial Sequence: Synthetic polynucleotide
gaaggaatagtgaataagattgaggaagaaagagcccgtcgtgaaaaagcattaggaagagatagaaagaaacaaggaaaaactgttaggggagtagtatatacaaaatttcttattccccaaatagatgtgaaatatgaaaatcctatgaggcaagcagaatatgcatatagtttaatcggaaatgaggtgagcacttaatgaatcttgctaaaaatattaccatgattcctacaagaagaatggtgggtacgcaaaag

SEQ ID NO: 103 - DNA, 260 bp, Artificial Sequence
  Description of Artificial Sequence: Synthetic polynucleotide
ctgttcacaccaggggagatccccgaaggcgagccgctaccggagccctcgccacgttagagagaaggagatagagaatgaacaccccgacgcctgctgccggttggtacccggaccccagtggagcgcccggacagcgctacttcgacgggaccgagtggacctcccactctcagccgccagcgcacacacctcagccggtggcagtgctgccgaagaagaccaaccacgcgctgcatctgctgctgtccctcctgacc

SEQ ID NO: 104 - DNA, 260 bp, Artificial Sequence
  Description of Artificial Sequence: Synthetic polynucleotide
tacgagcagcatctcaggctcggcagcgtggtcgaacggctacacaccgggatgtcgtagagcgactacccccgagaacgcagaaaagccccctacgcgccgtgtaagggcacgcagagggctctctggtagtctctattcagttgtggggttgcgtccgtcagcgtggacgctagaggggtttacgggacctttccagcctgccgcgtccgggtatacgcggcgtctgccgtccgggtatacgatagtaaccggcttcc

SEQ ID NO: 105 - DNA, 260 bp, Artificial Sequence
  Description of Artificial Sequence: Synthetic polynucleotide
aagaacccggacggctctatcaagaaggtcctcaagaacggcaagctgaagaccgtgtacggctgcgaggtccgctgcggcggaggccgcgcccacaaagaggtcaccgaaacctactgacctcgcataccaagaaaccccctacccggcccgcgaaggctaggtagggggctttttgtgtttcagtgggcgtggccgtgatgacctgtgtcttcgtggtttgtctggtcaaccaccgcggtctcagtggtgtacggtac

SEQ ID NO: 106 - DNA, 260 bp, Artificial Sequence
  Description of Artificial Sequence: Synthetic polynucleotide
gaacccggacggctctatcaagaaggtcctcaagaacggcaagctgaagaccgtgtacggctgcgaggtccgctgcggcggaggccgcggcaagaccgagaccaccgatccgtggtgatctaacctcgcgcaccaagaaaccccctacccggcccgcgaaggctaggtagggggctttttgtgtttcagtgggtatggccgtgatgacctgtgtcttcgtggtttgtctggtcaaccaccgcggtctcagtggtgtacgg

SEQ ID NO: 107 - DNA, 260 bp, Artificial Sequence
  Description of Artificial Sequence: Synthetic polynucleotide
gtcggcgggttcggatcactgggccagcatcttcgtgccgttctgatcaccagagggtcgcgtcgcgccactgcggcggaggccgcggcaagaccgagacctccgatccgtggtgatctaaccccgcataccaagaaacccctacccggcccgcgaaggctaggtagggggcttttcttgtttcagtgggtgtggccgtgatgacctgtgtcttcgtggtttgtctggtcaaccaccgcggtctcagtggtgtacggtac

SEQ ID NO: 108 - DNA, 260 bp, Artificial Sequence
  Description of Artificial Sequence: Synthetic polynucleotide
gacctacgccaagcacgccgacggctcgtacaagatggacggcaccaagcacgtctacaagtgtgtccgtcactgcggcggaggccgcggcaagaccgagaccaccgatccgtggtgatctaaccccgcataccaagaaaccccctacctagccttcgcgggccgggtagggggctttttgtgtttcagtgggtatggccgtgatgacctgtgtcttcgtggtttgtctggtcaaccaccgcggtctcagtggtgtacgg

SEQ ID NO: 109 - DNA, 260 bp, Artificial Sequence
  Description of Artificial Sequence: Synthetic polynucleotide
acctacgccaagcacgccgacggctcgtacaagatggacggcaccaagcacgtctacaagtgccagcgccactgcggcggaggccgcggcaagaccgagaccaccgatccgtggtgatctaaaccccgcataccaagaaaccccctacccggcccgcgaaggctaggtagggggctttttgtgtttcagtgggtatggccgtgatgacctgtgtcttcgtggtttgtctggtcaaccaccgcggtctcagtggtgtacgg

SEQ ID NO: 110 - DNA, 260 bp, Artificial Sequence
  Description of Artificial Sequence: Synthetic polynucleotide
acatcctcttgtcctagtaagactctatctgaaaaacggatattagctacatttgaagataaaattggatttaaaccagataaaaattgggttaccgaaaatatcaagaaggttatttatgactcatcagtaggtttaattaccgtctttcctataaaaggtagaaaatatgaactgaaggttagaaaggagcacttcttatgaaaaacgtcataactattgaagcaaatgcgcctaggaactcagagttagctagcatt

SEQ ID NO: 111 - DNA, 260 bp, Artificial Sequence
  Description of Artificial Sequence: Synthetic polynucleotide
gcccgcgccgccgaggagcggcgcaagtacgggatcccggatgacgaggtggctctgtgagcgacgttgatcgcccgctacgggtgacggtggggtatctggtaggccgtcaggtgactctgggccagatgttgaccgcgctggggatgtcccgcagcacctactacgcgcagatggaagctgggacgctgcacagcgccgatcacctcgtaaagacggcgcggcacttccacctcaaccccgtcgacctgctcgtaagg

SEQ ID NO: 112 - DNA, 260 bp, Artificial Sequence
  Description of Artificial Sequence: Synthetic polynucleotide
aagaacccggacggctctatcaagaaggtcctcaagaacggcaagctgaagaccgtgtacggctgcgaggcccgctgcggcggaggccgcgcccacaaagaggtcaccgaaacctactgacctcgcataccaagaaaccccctacctagccttcgcgggccgggtagggggctttttgtgtttcagtgggtatggccgtgatgacctgtgtcttcgtggtttgtctggtcaaccaccgcggtctcagtggtgtacggtac

SEQ ID NO: 113 - DNA, 260 bp, Artificial Sequence
  Description of Artificial Sequence: Synthetic polynucleotide
gattttgaatatgaaatagcccaaaaactaacacaatctttgttggagcaaggacttatttccacagaagaatacaacaaaatcaaggtgttgaacatagaaaaattttcacctttttataaggatttgatggatatatgacttgataattacagcaagtagagtgatatatagtactgataaaataaggaggtgagacaatggcaaggataacaaaaatcgaaactacaaaaagcttcgtgaaagaaagaaaaatacgt

SEQ ID NO: 114 - DNA, 260 bp, Artificial Sequence
  Description of Artificial Sequence: Synthetic polynucleotide
acatcctcttgtcctagtaagactctatctgaaaaacggatattagctacatttgaagataaaattggatttaaaccagataaaaattgggttaccgaaaatatcaagaaggttatttatgactcatcagtaggtttaattaccgtctttcctataaaaggtagaaaatatgaactgaaggttagaaaggagcacttcttatgaaaaacgtcataactattggagcaaatgcgcctaggaactcagagttagctagcatt

SEQ ID NO: 115 - DNA, 260 bp, Artificial Sequence
  Description of Artificial Sequence: Synthetic polynucleotide
acacggcaacaatacggtatatcaacttgcccaagtaaaaccttatcagagcgtcgtttggtacggacagttaaggaacaactaggagattatctcggtagcattcaaaaggttatgtttgattctagttcaaatcaagtcacactctattttgacgacgacaacattcaaatactaacacttaagcgaggacaattgaaatgaagaaagtcattaccattgaacctgctagacctgttcaccaagtagaagaaacctca

SEQ ID NO: 116 - DNA, 260 bp, Artificial Sequence
  Description of Artificial Sequence: Synthetic polynucleotide
tgcaggacaagagatgccaaaggtgttgaggcttgtctaggacgtactattacagaagaacaactttttcaagcttttggcgagaccttaaaggcagaagatattcaccatatttcttttaatagcgtgaccaatgaagctaaagctacctatagaaatggagaagaaaaacacatcatcattcagaaaggacggtagacatgaaaaaagtcatcacgatagaaccagctaaacaagtaagccataaggttgacctgccg

SEQ ID NO: 117 - DNA, 260 bp, Artificial Sequence
  Description of Artificial Sequence: Synthetic polynucleotide
tgcaggacaagagatgccaagggtgtcgaggcttgtctaggacgtaccgttacagaagaacagctctttcaagcctttggtgagagcataaatacagaagacattcaccatatttcttttaatagcgtgaccaatgaagctaaagcgacctatagaaatggagaagaaaaacacgtcatcattcagaaaggacggtagacatgaaaaaagttatcacgatagaaccagccaaacaggtcacccataaggttgacctgccc

SEQ ID NO: 118 - DNA, 260 bp, Artificial Sequence
  Description of Artificial Sequence: Synthetic polynucleotide
tggggtgatccaagtgggcaaaaaaaagaaggcttttacaattaggtatatcccctgcgatgaggcagaaggcaaacttaatgagatagtaaaggatttaattaaagaaaagataaacaccgccttgtcccagtatgattctatagaatataatgatattgaaaaatcaattagccattatataacaggggtatatagttatgaaaaacaaaatagcaatttatgttcgggtatcgactacaaaagaatctcaaaaggat

SEQ ID NO: 119 - DNA, 260 bp, Artificial Sequence
  Description of Artificial Sequence: Synthetic polynucleotide
tggggtgatccaagtgggcaaaaaaaagaaggcttttacaattaggtatatcccctgcgatgaggcagaaggcaaacttaatgagatagtaaaggatttgattaaagaaaagataaacagcgccttgtcccagtatgattctatagaatataatgatattgaaaaatcaattagccattatataacaggggtatgtagttatgaaaaacaaaatagcaatttatgttcgggtatcgactacaaaagaatctcaaaaggat

SEQ ID NO: 120 - DNA, 260 bp, Artificial Sequence
  Description of Artificial Sequence: Synthetic polynucleotide
aaggtctacaagtgcgtccgtcactgcggcggaggccgcggcaagaccgagaccaccgatccgtggtgatctaaccccgcataccaatatggtcccttatcggacctattgacgcaaagaaaccccctacctagccttcgcgggccgggtagggggcttttcttgtttcagtgggtatggccgtgatgacctgtgccttcgtggtttgtctggtcaaccaccgcggtctcagtggtgtacggtacaaacccatgagagcc

SEQ ID NO: 121 - DNA, 260 bp, Artificial Sequence
  Description of Artificial Sequence: Synthetic polynucleotide
ggtgtcatcgttgcgaactggatcgagccacacgacatcgagaagcgcctggcctcttgaccgttcgtgtgccaggctcctcggtgccatgcaccactcagggataggagacctgatgtacgcgaatgtcccaccgcccgtgccgttccagcctcagcggaaggcggcaccgaacccgctgttcctcgtcctcgcgatcctgtcgtccctgccgactgcattcttcgtgctctgcttcatcttgtccccctcgatgctgt

SEQ ID NO: 122 - DNA, 260 bp, Artificial Sequence
  Description of Artificial Sequence: Synthetic polynucleotide
ggaatatgactttcacatagccgagagtattatcgcaaacctatataaagaaggtaaaattacagtggatgaattacacaaaatatcagccttgaacaggcagaaattctctccccgtttagccgagattatgtcctaaaaagcttgctattaatagcttttagagtgatgtatgtaatgggcgaaagcgaggtgagatgatgaaaaagataacaaaaatagatgaactgccccagggacagctacctaatacgaaactt

SEQ ID NO: 123 - DNA, 260 bp, Artificial Sequence
  Description of Artificial Sequence: Synthetic polynucleotide
tgataaagagatatttgataaagctgaagaagttagagataagcgtgcaaaggatttaggacgagtggtagagcttgccgctttcacctctccccctcccaaagaacgatttaaaatgagaaaggcagataataagatgccagttgatccttttgaacgagcagaatacttatatagtctgatagaaagcgaggaataaagtgacagagaaaaatataatggttattcctgctcgtaaaagagtaggaagtacagccgca

SEQ ID NO: 124 - DNA, 260 bp, Artificial Sequence
  Description of Artificial Sequence: Synthetic polynucleotide
gccgcatggtcgctcgccgaggcgtgggcgcccggcgcgctcatcctctccgggagccactcgcgcgacctcgccgagtaccgagccgctcgcggcctctagctcgccctcgcaaggccctcgcttaggcgggggccttttcgcgtattctcgatgcgcactaggtacataccgcgcccgcattctgtacctagtgcgcattgggttgtcgctcgtgtaggctcttgcgcatgtcgactcccgcaagccctccgcgcgcc

SEQ ID NO: 125 - DNA, 260 bp, Artificial Sequence
  Description of Artificial Sequence: Synthetic polynucleotide
gcatcatcatgttcatgtaggacgttaggagaaaagcgacttttggcatcgtttaaaagcaagttaggcattgtaccagataaagagtgggttgaaaataatattaagcacatcgattatgattttggtcaacgtatcatctgggttataccagtaaaaggaaggaaatatcctatagaaattagagaggggcgatattagtgaagaaagtaattactattcaggctacaccaagtattattaggtcaagttcagatgat

SEQ ID NO: 126 - DNA, 260 bp, Artificial Sequence
  Description of Artificial Sequence: Synthetic polynucleotide
tgacaaagagatatttgataaagctgaagaagttagagataagcgtgcaaaggatttaggacgagtggtagagcttgccgctttcacctctccccctcccaaagaacgatttaaaatgagaaaggcagataataagatgccagttgatccttttgaacgagcagaatacttatatagtctgatagaaagcgaggaataaagtgacagagaaaaatataatggttattcctgctcgtaaaagagtaggaagtacagccgca

SEQ ID NO: 127 - DNA, 260 bp, Artificial Sequence
  Description of Artificial Sequence: Synthetic polynucleotide
ggaatatgattttcacatagcagagagtattgtcgcaaacctatataaagaaggcaaaatcacagcggatgaattaaacaaaatatcagccttgaacaggcagaaattctctccccgtttagccgagattatgtcctgaaaagcttgctattaatagcttttagagtgatgtatgtaatgggcgaaagcgaggtgagatgatgaaaaagataacaaaaatagatgaactgcccaagggacaactacctaatacgaaactt

SEQ ID NO: 128 - DNA, 260 bp, Artificial Sequence
  Description of Artificial Sequence: Synthetic polynucleotide
ggcgtcatcgtcgcgaactggatcgagccacacgacatcgagaagcgcctggcctcttgaccgttcgtgtgccaggctcctcggtgccatgcaccactcagggataggagtcctgatgtacgcgaatgtcccaccgcccgtgccgttccagcctcagcggaaggcggcaccgaacccgctgttcctcgtcctcgcgatcctgtcgtccgtgccgactgcattcttcgtactctgcttcatcttgtccccctcgatgctgt

SEQ ID NO: 129 - DNA, 260 bp, Artificial Sequence
  Description of Artificial Sequence: Synthetic polynucleotide
ggcgtcatcgtcgcgaactggatcgagccacacgacatcgagaagcgcctggcctcttgaccgttcgtgtgccaggctcctcggtgccatgcaccactcagggataggagacctgatgtacgcgaatgtcccaccgcccgtgccgttccagcctcagcggaaggcggcaccgaacccgctgttcctcgtcctcgcgatcctgtcgtccgtgccgactgcattcttcgtactctgcttcatcttgtccccctcgatgctgt

SEQ ID NO: 130 - DNA, 260 bp, Artificial Sequence
  Description of Artificial Sequence: Synthetic polynucleotide
ggtgtcatcgtggcgcactggatcgagccacacgacatcgagaagcgcctggcttcttgactggacatgtgccaggctcctatctcccagcaagttcacagggataggagacctgatgcacaacttcaccatcgccctcgtcgccgttgcggctgcagccaccatcgccgggtgctcggcaccgacccccaaggtcgacagcagtccgaagagctctgcgccgagcagcgagcctgccgcgacggagctcgcgaccacgg

SEQ ID NO: 131 - DNA, 260 bp, Artificial Sequence
  Description of Artificial Sequence: Synthetic polynucleotide
ggggaaacggactgacccggacacgccggacatgctagaactgtatttcacgcgcactcggaaacccgaaggcgctcaactgacacttcaggagagaccttcccgtgacagcaaacgcccaggtcagcggcacgtcaccgactcccttcatggcgggcatgacgacccccttgcgtggcctatccgtactccgtctgtctgtgctcacggacgagacgacaagccctgagcggcagcgtggcgccaaccatgacgccggc

SEQ ID NO: 132 - DNA, 260 bp, Artificial Sequence
  Description of Artificial Sequence: Synthetic polynucleotide
ggggaaacgggcttacccggacacccgggacatgctagaactgtatttcgcgcgcctccggaaacccgaaggcgctcaactgacacttcaggagagaccttcccgtgacggcaaacgcccaggtcagcgccgggtcaccgactcccttcatggcgggcatgacgaccccccttcgtggcctatccgtactccgtctgtctgtgctcaccgacgagacgacaagccctgagcggcagcgtgccgccaaccatgacgccggc

SEQ ID NO: 133 - DNA, 260 bp, Artificial Sequence
  Description of Artificial Sequence: Synthetic polynucleotide
agaagcctatactggaacacttgtcttacaaaaaacgtatcatgtagggcacaaaggacgttcagttgaaaataaaggagagcgaacaaagtacattgtagaaaatgcccatgaggcgattatctcaagagaaatgtttgaagaggtgcaacaagagaaagcaagaagaagtttacacaacaagaaaaaggaggggcgtcatgactaaaaagattattacgatagaacctgcaaaaatcttacgatcatcagaactaccc

SEQ ID NO: 134 - DNA, 260 bp, Artificial Sequence
  Description of Artificial Sequence: Synthetic polynucleotide
ccccggaacatcgaggtcgtcgtgccccaggaccgcgtggcggttgacctggctatttgacatcgcctatgccagggtgtgtgtcatgtcaaatccggtgccatacccctaccccgtaccgtcgaagcggaagcccgcgcccaacccgctgttcctcaccctctcgatcctgtcggggttcccgaccgcgttcttcctactgctcttcgtgtccggtggcacctcggtcttcgtcatgatcgggttcctctggtccgcga

SEQ ID NO: 135 - DNA, 85 bp, Artificial Sequence
  Description of Artificial Sequence: Synthetic oligonucleotide
gaactgtccaaaaagttcgcacaaggtcacgtcacctccaccaacataaaagccacctgaaaacttacgtttttcaggtggcttt

SEQ ID NO: 136 - DNA, 260 bp, Artificial Sequence
  Description of Artificial Sequence: Synthetic polynucleotide
ccatccgcgcgaggaccggtcttcgcacgggggcacaccagtaccgccttctggcacaccaggccctcgccgcctaccagcggggactgtccccgcgctgaccccaacgccaaaggcccccagctcatcatcgagccgggggccttttcgcgtacccgccaccgtgactagcaggataggtcttgtcagatgtactccatatgacctatcctttcaatatggatcaagacctcgccaagcctacccgccgcccacgcgcc

SEQ ID NO: 137 - DNA, 260 bp, Artificial Sequence
  Description of Artificial Sequence: Synthetic polynucleotide
aacaaaaaccgcgtatatgacccaaatgaggtggttttacgggtccatttggttgaatgaaaaacacgtttaaacggctctgttgagccattttttatacttgttcgcgcattaaaccaatcatgtcattggtgtcaatgcaacaacattgttttatagggaaagtgagcggtgggccgaatgacggttcatcgctctttctttttatcatcgtatacccccgaccgtaaataaaaagaccacccacaggtggcctttca

SEQ ID NO: 138 - DNA, 260 bp, Artificial Sequence
  Description of Artificial Sequence: Synthetic polynucleotide
gctcgtacaagatggatggcaccaagcacgtctacaagtgccagcgccactgcggcggaggccgcggcaagaccgagaccaccgatccgtggtgatctaacctcgcataccaagaaaccccctacccggcccgcgaaggctaggtagggggcttttcttgtttcagtgggtatggccgtgaagacctgtgtcttcgtggtttgtctggtcaaccactgcggtctcagtggtgtacggtacaaaccatgagggctctcgtc

SEQ ID NO: 139 - DNA, 260 bp, Artificial Sequence
  Description of Artificial Sequence: Synthetic polynucleotide
ggcggcgaagagttcctggcctcgacggtactggcgaaagccggtatagcgtcacagtgacgaatcgaccttataccacagcaaccccttgaaacgcaaaaaagccccccaaccagggatttctccttggaaggggggtttctttgtctagtaggcgtagaaccacgcctgtccgcgagcgcctgcgctgcccgctgtggtcgagatggtcgtcccgcaaccggcaccgccgggggcgtttcctgctcccgtgagtgcgg

SEQ ID NO: 140 - DNA, 260 bp, Artificial Sequence
  Description of Artificial Sequence: Synthetic polynucleotide
ccgttcacaaaaacggcaaagaccacaaggtctacaagtgcgttcggcactgcggcggaggccgcggcaagaccgagaccaccgacccgtggtgatctaaccccgcataccaagaaaccccctacccggcccgcgaaggctaggtagggggcttttcttgtttcagtgggtatggccgtgatgacctgtgtcttcgtggtttgtctggtcaaccaccgcggtctcagtggtgtacggtacaaaccatgcgagctctcgtc

SEQ ID NO: 141 - DNA, 60 bp, Artificial Sequence
  Description of Artificial Sequence: Synthetic oligonucleotide
gaaagttcgtctgggatgcgtctggtccgagtggcgagaatcgaactcacggcctcttga

SEQ ID NO: 142 - DNA, 260 bp, Artificial Sequence
  Description of Artificial Sequence: Synthetic polynucleotide
ggcggaggccgcggcaagaccgagaccaccgatccgtggtgatctaaccccgcataccaaaaaaccccctacccggcccgcgaaggctaggtagggggctttttcgcgttcaggggacctgatcgctcagcgacccatctccgatgggatcgcgtttgtgtttcagtgggtatggccgtgaagacctgtgtcttcgtggtttgtctggtcaaccactgcggtctcagtggtgtacggtacaaaccatgagggctctcgtc

SEQ ID NO: 143 - DNA, 260 bp, Artificial Sequence
  Description of Artificial Sequence: Synthetic polynucleotide
tataactatatttttgcagaagaactaacaagaaaactcttagataagggatttattacagaggaagaatacgagaaaatcatgagaaaaaaccgtcataaatttaagccttttttatcgaagatattgccataaatcacttgatatatacagcgtttagagtgatatatgtaataccgaaaaaagaagggggtgagacaatgaaacggataacaaaaattgagccggcgaaaaaaacatcaaagaaaaaattgagagtt

SEQ ID NO: 144 - DNA, 260 bp, Artificial Sequence
  Description of Artificial Sequence: Synthetic polynucleotide
tcaagacacctatacgggacgattaatattacaaaaaacatatcgtgtagcacataaaggaagatctgttatgaatcaaggtgagcatacaaagtatatcgttgaacaagcccatgagccgattatctcaaaagaacaatttgaagaagtccagcaagtaaaagccacaagaagtaatcattatcagaaaggagcaaagcatggcgaaaaagattgtcaccatagaagcagttaagcctgtttgtcatcaagtagatttt

SEQ ID NO: 145 - DNA, 260 bp, Artificial Sequence
  Description of Artificial Sequence: Synthetic polynucleotide
gaaataatagttgatcgaacagacgaaaatgaagcaaaaataaaagtaaattttctctaaggggataggactttaaagagacttttggaaaaggaacttaattataataatactttatttagtctatctctaggtggaactgtacttaattaagtcgaaatataatcaagtaccaaaagttgtcctatccccgttataacaaagaatacaagtatttttctaaattgattgaaattagatttttaaataatttgagtatg

SEQ ID NO: 146 - DNA, 60 bp, Artificial Sequence
  Description of Artificial Sequence: Synthetic oligonucleotide
tcaaaagttgatgttaccgctgataatatagatatcatatttaaattccaactcgcttaa

SEQ ID NO: 147 - DNA, 89 bp, Artificial Sequence
  Description of Artificial Sequence: Synthetic oligonucleotide
tcaaaagttgatgttaccgctgataatatagatatcatatttaaattccaactcgcttaattgcgagtttttatttcgtttatctcaat

SEQ ID NO: 148 - DNA, 260 bp, Artificial Sequence
  Description of Artificial Sequence: Synthetic polynucleotide
ccccggaacatcgaagtcgttgtgccacaggaccgcgtagcggtcgacctggctatctgataggcggtatgccagggtgtgtgccatgtcaaatcaggtgccatacccctaccccgtacctccgaagcgcaaggccgcgccgaacccgctgttcctcgtcctcgcgatcctgtcggcgctgccgaccgcgttcttcggactcgcgttcctcatgtccccgacgatgctctgggtgatggcgaccggctggtgcggtatgt

SEQ ID NO: 149 - DNA, 260 bp, Artificial Sequence
  Description of Artificial Sequence: Synthetic polynucleotide
tgcaggacaagagatggcaagggtgttgaggcttgtctaggacgtaccgttacagaagaacaactctttcaagcctttggtgagagcataaatatagaagacattcaccatatttcttttaatagcgtgaccaatgaagctaaggtgacctatagaaatggaaaagaaaaacacgtcatcattcagaaaggacggtagacatgaaaaaagttatcacgatagaaccagctaaacaagtcacccatatggttgacctgccc

SEQ ID NO: 150 - DNA, 260 bp, Artificial Sequence
  Description of Artificial Sequence: Synthetic polynucleotide
aaaccccctagttctaatcattaccccatgaataaaataacagaagtaaaaattgtatttcaaatcgccaatttttaaaattgcggcctaaactcggcccaatttttaaatttttcctaaggaaaaatcgaatttgtttaaaggaaatatcttcgatatacttattattaaatgtgtaccatttgcaaaggggtgtggttatggaattaacgccaattgaattcaaaaaagacacggaaaaaatcatcccatacagtgag

SEQ ID NO: 151 - DNA, 260 bp, Artificial Sequence
  Description of Artificial Sequence: Synthetic polynucleotide
tcgttaagtttttttattgaaagtggtttgcctacttatagagacagatatgagatgcaagctgacaaatttgctgctgaattgcttatcccagatggctattcaaaatgtgaaattgctaatatgacaatagaacaattaagttgttattttggcgtaaatgaacgtcttattaaatataagtttgggtggtggtaataatgaatcgtgtatgtatttatcttaggaagtcccgagcagacgaagaaatagaaaaagag

SEQ ID NO: 152 - DNA, 260 bp, Artificial Sequence
  Description of Artificial Sequence: Synthetic polynucleotide
agggtgcccgaggagctgactcgccgcctcggactacccgaccccgttccgtcacagtgacgctttgaacgcaaaaaagccccctcccaaggacactgaggtccctgagagggggtttctttgtcagccgacccgcaccatggagaaccaggtgttggccgcgttcgcgtcaccgaggatgttgacgttgccaccggtcttcagtccgggctggaccgtcgcgcctgccgcgaggtagtactgcacaccgtcgccgccgt

SEQ ID NO: 153 - DNA, 260 bp, Artificial Sequence
  Description of Artificial Sequence: Synthetic polynucleotide
ccccggaacatcgaggtcgtcgtgccccaggaccgcgtggcggttgacctggctatttgacatcgcctatgccagggtgtgtgtcatgtcaaatccggtgccatacccctaccccgtaccgtcgaagcggaagcccgcgcccaacccgctgttcctcaccctctcgatcctgtcggggttcccgaccgcgttcttcctgctgctcttcgtgaccggtggcacctcgatcctcgtcatgatcgggttcctctggtcagcca

SEQ ID NO: 154 - DNA, 260 bp, Artificial Sequence
  Description of Artificial Sequence: Synthetic polynucleotide
ccccggaacatcgaggtcgtcgtgccccaggaccgcgtggcggttgacctggctatttgacatcgcctatgccagggtgtgtgtcatgtcaaatccggtgccatacccctaccccgtaccgtcgaagcggaagcccgcgcccaacccgctgttcctcaccctctcgattctgtcggggttcccgaccgcgttcttcctactgctcttcgtgaccggtggcacctcggtcttcgtcatgatcgggttcctctggtcagcca

SEQ ID NO: 155 - DNA, 260 bp, Artificial Sequence
  Description of Artificial Sequence: Synthetic polynucleotide
ccccggaacatcgaggtcgtcgtgccccaggaccgcgtggcggttgacctggctatttgacatcgcctatgccagggtgtgtgacatgtcaaatccggtgccatacccctaccccgtaccgtcgaagcggaagcccgcgccgaaccctctgttcctcgtcctcgcgatcctgtcggccgtgccgactgcgttcttcgtgctcgcgttcctcttgtcaccgacgatgctttgggtgctggcagccgggtggtgcggaatgt

SEQ ID NO: 156 - DNA, 260 bp, Artificial Sequence
  Description of Artificial Sequence: Synthetic polynucleotide
gccctccacttcgacatccgggtcccgcacgaactgacacagagactcatcgccccatgagaaacacagaaggaaggagaaccatgttcaaactcgctatctctctcgcggctgcagcagccctgctggccgggtgcggccagagcgcgcccaccgcagcgccagccgccgcccaggagaaggacgcgaagcggggggccgtcgtcttcgagatcggaggggactactcctacgccacctacgacgacaacttcgagaac

SEQ ID NO: 157 - DNA, 260 bp, Artificial Sequence
  Description of Artificial Sequence: Synthetic polynucleotide
aaccccgaataccaagaaaccccctacccggcccgcgaaggctaggtagggggctttttcgcgttcaggggacctgatcgctcagcgacccatctccgatgggatcgcgtttgttttcagtgggcgtggccgtgatgacctgtgtcttcgtggtttgtccggtcaaccaccgcggtctcagtggtgtacggtacaaacccatgagagctctcgtcgtgatccgcttgtcccgcgtcaccgatgctacgacctcaccggag

SEQ ID NO: 158 - DNA, 260 bp, Artificial Sequence
  Description of Artificial Sequence: Synthetic polynucleotide
ccactgcggcggcggccgcggcaagaccgagaccaccgacccgtggtgatctaaccccgcataccaagaaaccccctacccggcccgcgaaggctaggtagggggctttttgtgtttcagtgggtgtgaccgtgatgacctgtgtcttcgtggtttgtctggtcaaccaccgcggtctcagtggtgtacggtacaaacccatgagagccctggtagtgatccgactgtcccgcgtcaccgatgctacgacctcgccggag

SEQ ID NO: 159 - DNA, 260 bp, Artificial Sequence
  Description of Artificial Sequence: Synthetic polynucleotide
gaggcccgctgcggcggaggccgcgcccacaaagaggtcaccgaaacctactgacctcgcataccaagaaaccccctacctagccttcgcgggccgggtagggggcttttcttgtttcagtgggtatggccgtgatgacctgtgtcttcgtggtttgtctggtcaaccaccgcggtctcagtggtgtacggtacaaacccatgagagccctggtagtgatccgcctgtcccgcgtcaccgatgctacgacctcaccggag

SEQ ID NO: 160 - DNA, 260 bp, Artificial Sequence
  Description of Artificial Sequence: Synthetic polynucleotide
gaggtccgctgcggcggaggccgcgcccacaaagaggtcaccgaaacctactgacctcgcataccaagaaaccccctacctagccttcgcgggccgggtagggggcttttcttgtttcagtgggtatggccgtgatgacctgtgtcttcgtggtttgtctggtcaaccaccgcggtctcagtggtgtacggtacaaacccatgagagtcctggtagtgatccgactgtcccgcgttaccgatgctacgacttcaccggag

SEQ ID NO: 161 - DNA, 260 bp, Artificial Sequence
  Description of Artificial Sequence: Synthetic polynucleotide
gaggtccgctgcggcggaggccgcgcccacaaagaggtcaccgaaacctactgacctcgcataccaagaaaccccctacctagccttcgcgggccgggtagggggctttttgcgtttcagtgggtgtggccgtgatgacctgtgtcttcgtggtttgtctggtcaaccaccgcggtctcagtggtgtacggtacaaacccatgagagccctggtagtgatccgactgtcccgtgtcaccgatgctacgacttcacccgag

SEQ ID NO: 162 - DNA, 260 bp, Artificial Sequence
  Description of Artificial Sequence: Synthetic polynucleotide
ccactgcggcggaggccgcggcaagaccgagaccaccgatccgtggtgatctaaccccgcataccaagaaaccccctacccggcccgcgaaggctaggtagggggctttttgtgtttcagtgggtatggccgtgatgacctgtgtcttcgtggtttgtctggtcaaccaccgcggtctcagtggtgtacggtacaaacccatgagagccctggtagtcatccgcctgtcccgcgtcaccgatgctacgacttcgccggag

SEQ ID NO: 163 - DNA, 260 bp, Artificial Sequence
  Description of Artificial Sequence: Synthetic polynucleotide
ccccggaacatcgaggtcgtcgtgccccaggaccgcgtggcggttgacctggctatttgacatcgcctatgccagggtgtgtgtcatgtcaaatccggtgccatacccctaccccgtaccgtcgaagcggaagcccgcgcccaacccgctgttcctcaccctctcgatcctgtcgggattcccgaccgcgttcttcctactgctcttcgtgaccggtggcacctcgatcttcgtcatgatcgggttcctctggtcagcca

SEQ ID NO: 164 - DNA, 260 bp, Artificial Sequence
  Description of Artificial Sequence: Synthetic polynucleotide
ccactgcggcggcggccgcggcaagaccgagaccaccgatccctggtgatctaacctcgcgcaccaagaaaccccctacccggcccgcgaaggctaggtagggggctttttgtgtttcagtgggtatggccgtgatgacctgtgtcttcgtggtttgtctggtcaaccaccgcggtctcagtggtgtacggtacaaacccatgagagccctggtagtcatccgactgtcccgcgtcaccgatgctacgacctcaccggag

SEQ ID NO: 165 - DNA, 260 bp, Artificial Sequence
  Description of Artificial Sequence: Synthetic polynucleotide
accccgcataccaagaaaccccctacccggcccgcgaaggctaggtagggggctttctcgcgttcaggggacctgatcgctcagcgacccatctccgatgggatcgcgtttgtgtttcagtgggcgtggccgtgatgacctgtgtcttcgtggtttgtctggtcaaccaccgcggtctcagtggtgtacggtacaaacccatgagggctctcgtcgtgatccgcctgtcccgtgtcaccgatactacgacttcacccgag

SEQ ID NO: 166 - DNA, 260 bp, Artificial Sequence
  Description of Artificial Sequence: Synthetic polynucleotide
cactgcggcggaggccgcggcaagaccgagaccaccgatccgtggtgatctaacccccgcataccaagaaaccccctacctagccttcgcgggccgggtagggggctttttgcgtttcagtgggtatggccgtgatgacctgtgtcttcgtggtttgtctggtcaaccaccgcggtctcagtggtgtacggtacaaacccatgagagccctggtagtcatccgcctgtcccgcgtcaccgatgctacgacctccccggag

SEQ ID NO: 167 - DNA, 260 bp, Artificial Sequence
  Description of Artificial Sequence: Synthetic polynucleotide
ccccggaacatcgaggtcgtcgtgccccaggaccgcgtggcggttgacctggctatttgacatcgcctatgccagggtgtgtgtcatgtcaaatccggtgccatacccctaccccgtaccgtcgaagcggaagccagcgcccaacccgctgttcctcaccctctcgatcctgtcggggttcccgaccgcgttcttcctactgctcttcgtgaccggtggcacctcgatcttcgtcatgatcgggttcctctggtcagcca

SEQ ID NO: 168 - DNA, 260 bp, Artificial Sequence
  Description of Artificial Sequence: Synthetic polynucleotide
acctcgcataccaagaaaccccctacccggcccgcgaaggctaggtagggggcttttcttgtttcagggggtatggccgtgaagacctgtgtcttcgtggtttgtctggtcaaccaccgcggtctcagtggtgtacggtacaaaccaggcccggggcgaagctccggccgtaagcgtcaatcgtccgaaggagatctagcgtgagagcgctggtggtgatccgtctatcccgtgtgaccgatgctacgacctccccggag

SEQ ID NO: 169 - DNA, 260 bp, Artificial Sequence
  Description of Artificial Sequence: Synthetic polynucleotide
actaaaactgaaaagggaaaagattatgaaattaaactttttcctaaacttcgtaaataagtctaactggcttatttacttggtttaatccaactacatacaacatactagatatatttcattacacacaataagttgtatgtaaattatttagtttcttcctatttatatataaaaaagcatagttaaaaactatgcttttaatcaacttattcaaaaaagtttatttttccttcattctcatagcctgttgttgctat

SEQ ID NO: 170 - DNA, 96 bp, Artificial Sequence
  Description of Artificial Sequence: Synthetic oligonucleotide
actaagaataaacgtggagatacctttggaatagatatatttcctaaacttaagccctagactgataacttgtccagggtatttcattgccttctt

SEQ ID NO: 171 - DNA, 92 bp, Artificial Sequence
  Description of Artificial Sequence: Synthetic oligonucleotide
actaaggataaacgtggagaaacttttggaatagatatatttccaaaacttaaaccctagactgataacttgtccagggtaattcattgcct

SEQ ID NO: 172 - DNA, 96 bp, Artificial Sequence
  Description of Artificial Sequence: Synthetic oligonucleotide
actaagaataaacgtggagaaacctttggaatagatatatttcctaaacttaaaccctagactgataacttgtctagggtatttcattgccttctt

SEQ ID NO: 173 - DNA, 260 bp, Artificial Sequence
  Description of Artificial Sequence: Synthetic polynucleotide
gccctgcgcttcgacatccgagtgccggcagaactgacccagcgcctgggagcgtcctgaaacgcaaaaaagcccccctccgaagaggggggcctttgcctagtcgaccgtgtagccgagctgttccagggcgtcctcgtgggacgtccccggagggaatttgtgtaggggagtgaggtcggtagcgagaccttcctcgttgcaggcgaatacgaccgtgggccgcacgacgtgcttgacggcctgtcggccttcgccca

SEQ ID NO: 174 - DNA, 260 bp, Artificial Sequence
  Description of Artificial Sequence: Synthetic polynucleotide
gccctgcacttcgacttccgggtccccgaggaactgacccagcggctcggagtctcctgaaacgcaaaaaagccccctcccaaggccgtagccctgagagggggtttctttgtctagccgactctcaccatcgagaaccaggagttggacgcattcgcgtcaccgaggatgttcacgtcaccgtcggtcttgagaccgggctgcaccgtcgcgccagcggagaggtagtactgcacaccgtcaccgccgtaggcgatgtc

SEQ ID NO: 175 - DNA, 260 bp, Artificial Sequence
  Description of Artificial Sequence: Synthetic polynucleotide
gccctccacttcgacatccgggtcccgcacgaactgacacagagactcatcgccccatgagaaacacagaaggaaggagaaccatgttcaaactcgctatctctctcgcggctgcagcagccctgctggccgggtgcggccagagcgcgcccactgcagcgccagccgccgcccaggagaaagaggcgaagcgggggaccgtcgtattcgagatcggaggggactactcctacgccacctacgacgacaacttcgagaac

SEQ ID NO: 176 - DNA, 260 bp, Artificial Sequence
  Description of Artificial Sequence: Synthetic polynucleotide
ggagcactcgagttcaatctcagagttcccgaggatgcacacgcccgcatggcctcttaaacacgaatagccccctcccggttaggggagggggaatcgtgactagatcaaggtcaggttgagtgcggacgagtccacgtttcgagcggacgtacggttggtgccagtgacgtacgcctggacttcgatcacgtcgccttcgtagaacctggatggtccggtctccagagtcacagaccagccgctggttgtgaatgtgc

SEQ ID NO: 177 - DNA, 260 bp, Artificial Sequence
  Description of Artificial Sequence: Synthetic polynucleotide
ggtgctctccagttcaatctccgagtgccagccgatgcacaagagcgcctagcctcttaaacgacgaaagccccctcccggttaagggagggggaatcgtgtcagaccagggtcagattgagcgcggacgaatccacgtttcgagcggacgtgcggttggtaccggtggtgtaagcctgaacctcgaccacgtcaccttcgtagaacctgtacggcccactatccagggtcactgcccatccacctgtagtgaacgagcc

SEQ ID NO: 178 - DNA, 260 bp, Artificial Sequence
  Description of Artificial Sequence: Synthetic polynucleotide
ggagcactcgagttccatctcagagtccccgaggatgcacacgaccgcatggcctcttaaacacgaaaagccccctcccggttaggggagggggaatcgtggctagaccaaagccaggctgagcgaggacgagtccacgtttcgagcggacgtacggttggtgccagtggtgtacgcctggacctcgaccacgtcaccgtcgtagaacctgtacgggccggtctccagagtgaccgaccagccgttgttggagaacgtac

SEQ ID NO: 179 - DNA, 260 bp, Artificial Sequence
  Description of Artificial Sequence: Synthetic polynucleotide
gccctgcacttcgacttccgggtccccgaggaactgacccagcggctcggagtcgcctgaaacgcaaaaaagcccccctcccggagcccgaaggccctgagaggggggtttctttgtcagccgactctcaccatcgagaaccaggtgttggccgcgttggcgtcaccgacgatgttcacgtcgccatcggtcttcagaccgggttggaccgtcgtacctgccgccaggtagtactgcacgccgtcgccgccgtacacgag

SEQ ID NO: 180 - DNA, 260 bp, Artificial Sequence
  Description of Artificial Sequence: Synthetic polynucleotide
gccctgcacttcgacttccgggtccccgaggaactgacccagcggctcggagtctcctgaaacgcaaaaaagccccctcccaaggccgtagccctgagagggggtttctttgtctagccgactctcaccatcgagaaccaggagttggacgcattcgcgtcaccgaggatgttcacgtcgccgtcggtcttgagaccgggctgcaccgtcgcgccagcggagaggtagtactgcacaccgtcaccgccgtaggcgatgtc

SEQ ID NO: 181 - DNA, 260 bp, Artificial Sequence
  Description of Artificial Sequence: Synthetic polynucleotide
tgcggcggcggtcgccacgccaaagaggtcaccgaaacctactgacctcgcatactaagaaaccccctacccggcccgcgaaggctaggtagggggctttttgcgtttcagtgggtgtggccgtgatgacctgtgtcttcgtggtttgtctggtcaaccaccgcggtctcagtggtgtacggtacaaacccatgcgcgctttggtagtgatccgcttgtcccgtgtgaccgatgctacgacttcacccgagcgtcagctg

SEQ ID NO: 182 - DNA, 260 bp, Artificial Sequence
  Description of Artificial Sequence: Synthetic polynucleotide
ggtgtcatcgtcgcgaactggatcgagccacacgacatcgagaagcgcctggcgtcctgaccgcttctatgccaggctcctggcttccagcatgttcacagggataggagacctgatgatgaatgtgaacgtcccaccgcccgtgccgttcgtgccgccgcagcggagggcggcgcccaaccctctgttcctcgtcctcgcgatcctctcagcgataccgactgcgttcttcgtgttcgcactcgtcgccgcgccgacga

SEQ ID NO: 183 - DNA, 260 bp, Artificial Sequence
  Description of Artificial Sequence: Synthetic polynucleotide
ctgaagtcgagcaagcccatgaacttcgctctacacgtcccgcagaaggaggcaggatgacgaccccagccccaggttggtacccagaccccgcaggtacaaaccagccgaggtactgggacggaaagaagtgggtgggtgaaccgaccactgtgccggtgaagacgaaccacgcgctgcatctcctgctgacgatcctcaccttctggatgttcggcggctggctgtgggtctggattctcgtcgcgatcgccaaccac

SEQ ID NO: 184 - DNA, 260 bp, Artificial Sequence
  Description of Artificial Sequence: Synthetic polynucleotide
cactgcggcggaggccgcggcaagaccgagaccaccgatccgtggtgatctaaaccccgcataccaagaaaccccctacccggcccgcgaaggctaggtagggggcttttcttgtttcagtgggtatggccgtgatgacctgtgtcttcgtggtttgtctggtcaaccaccgcggtctcagtggtgtacggtacaaacccatgagagccctggtagtgatccgcctgtcccgcgtcaccgatgctacgacctcacccgag

SEQ ID NO: 185 - DNA, 260 bp, Artificial Sequence
  Description of Artificial Sequence: Synthetic polynucleotide
ccactgcggcggcggccgcggcaaggtcgagaccaccgatccgtggtgatctaaccccgcataccaagaaaccccctacctagccttcgcgggccgggtagggggctttttgtgtttcagtgggtgtggccgtgatgacctgtgtcttcgtggtttgtctggtcaaccaccgcggtctcagtggtgtacggtacaaacccatgagagccctggtagtcatccgcctgtcccgcgtcaccgatgctacgacttcaccggag

SEQ ID NO: 186 - DNA, 260 bp, Artificial Sequence
  Description of Artificial Sequence: Synthetic polynucleotide
cactgcggcggaggtcgcggaaagaccgagaccaccgatccgtggtgatctaaccccacataccaagaaacccccctacccggcccgcgaaggctaggtagggggctttttgtgtttcagtgggtgtggccgagatgacctgtgtcttcgtggtttgtctggtcaaccaccgcggtctcagtggtgtacggtacaaacccatgagagccctggtagtcatccgcctgtcccgcgttaccgatgctacgacttcgccggag

SEQ ID NO: 187 - DNA, 260 bp, Artificial Sequence
  Description of Artificial Sequence: Synthetic polynucleotide
ccactgcggtggaggccgcggcaagaccgagaccaccgatccgtggtgatctaaccccgcataccaagaaaccccctacccggcccgcgaaggctaggtagggggctttttgtgtttcagtgggtatggccgtgatgacctgtgtcttcgtggtttgtctggtcaaccaccgcggtctcagtggtgtacggtacaaacccatgagagccctggtagtcatccgcctgtcccgcgtcaccgatgctacgacttcaccggag

SEQ ID NO: 188 - DNA, 260 bp, Artificial Sequence
  Description of Artificial Sequence: Synthetic polynucleotide
gaggtccgctgcggcggaggccgcgcccacaaagaggtcaccgaaacctactgacctcgcataccaagaaaccccctacccggcccgcgaaggctaggtagggggctttttgtgtttcagtgggcgtggccgtgatgacctgtgtcttcgtggtttgtctggtcaaccaccgcggtctcagtggtgtacggtacaaacccatgagggctctcgtcgtgatccgcctgtcccgtgtcaccgatgctacgacctcaccggag

SEQ ID NO: 189 - DNA, 260 bp, Artificial Sequence
  Description of Artificial Sequence: Synthetic polynucleotide
ccactgcggcggaggccgcggaaagaccgagaccaccgatccgtggtgatctaaccccgcataccaagaaaccccctacccggcccgcgaaggctaggtagggggcttttctcgtttcagtgggtgtggccgtgatgacctgtgtcttcgtggtttgtctggtcaaccaccgcggtctcagtggtgtacggtacaaacccatgcgcgctttggtagtgatccgcttgtcccgtgtcaccgatgctacgacttcacccgag

SEQ ID NO: 190 - DNA, 260 bp, Artificial Sequence
  Description of Artificial Sequence: Synthetic polynucleotide
ccgctgcggcggaggccgcggcaagaccgagaccaccgatccgtggtgatctaaccccgcataccaagaaaccccctacctagccttcgcgggccgggtagggggctttttgtgtttcagtgggtatggccgtgatgacctgtgtcttcgtggtttgtctggtcaaccaccgcggtctcagtggtgtacggtacaaacccatgagagccctcgtcgtgatccgactgtcccgcgtcaccgatgctacgacctcaccggag

SEQ ID NO: 191 - DNA, 260 bp, Artificial Sequence
  Description of Artificial Sequence: Synthetic polynucleotide
acctcgcataccaagaaaccccctacccggcccgcgaaggctaggtagggggctttttcgcgttcaggggacctgatcgctcagcgacccatctccgatgggatcgcgtttgcgtttcagtgggtgtggccgtgatgacctgtgtcttcgtggtttgtctggtcaaccaccgcggtctcagtggtgtacggtacaaacccatgagagccctggtagtgatccgactgtcccgcgtcaccgatgctacgacttcaccggag

SEQ ID NO: 192 - DNA, 260 bp, Artificial Sequence
  Description of Artificial Sequence: Synthetic polynucleotide
cactgcggcggaggccgcggcaagaccgagaccaccgatccgtggtgatctaaccacgcataccaagaaaccccctacctagccttcgcgggccgggtagggggcttttcttgttttcagtgggtatggccgtgatgacctgtgtcttcgtggtttgtctggtcaaccaccgcggtctcagtggtgtacggtacaaacccatgagagccctggtagtgatccgactgtcccgcgtcaccgatgctacgacttcaccggag

SEQ ID NO: 193 - DNA, 260 bp, Artificial Sequence
  Description of Artificial Sequence: Synthetic polynucleotide
gaggcccgctgcggcggaggccgcgcccacaaagaggtcaccgaaacctactgacctcgcataccaagaaaccccctacctagccttcgcgggccgggtagggggcttttcttgtttcagtgggtatggccgtgatgacctgtgtcttcgtggtttgtctggtcaaccaccgcggtctcagtggtgtacggtacaaacccatgagagccctggtagtgatccgactgtcccgcgtcaccgatgctacgacttcaccggag

SEQ ID NO: 194 - DNA, 260 bp, Artificial Sequence
  Description of Artificial Sequence: Synthetic polynucleotide
ccactgcggcggaggccgcggcaagaccgagaccaccgacccgtggtgatctaacctcgcacaccaagaaaccccctacccggcccgcgaaggctaggtagggggctttttgtgtttcagtgggtgtggccgtgatgacctgtgtcttcgtggtttgtctggtcaaccaccgcggtctcagtggtgtacggtacaaacccatgagagccctggtagtcatccgcctgtcccgcgtcaccgatgctacgacttcaccggag

SEQ ID NO: 195 - DNA, 260 bp, Artificial Sequence
  Description of Artificial Sequence: Synthetic polynucleotide
gcactgcggcggaggccgcggcaagaccgagaccaccgacccgtggtgatctaaccccgcataccaagaaaccccctacccggcccgcgaaggctaggtagggggcttttcttgtttcagtgggtatggccgtgatgacctgtgtcttcgtggtttgtctggtcaaccaccgcggtctcagtggtgtacggtacaaacccatgagagccctggtagtcatccggctgtcccgcgtcaccgatgctacgacctcaccggag

SEQ ID NO: 196 - DNA, 260 bp, Artificial Sequence
  Description of Artificial Sequence: Synthetic polynucleotide
ccactgcggcggaggccgcggcaagaccgagaccaccgatccgtggtgatctaaccccgcataccaagaaaccccctacctagccttcgcgggccgggtagggggctttttgcgtttcagtgggtgtgaccgtgatgacctgtgtcttcgtggtttgtctggtcaaccaccgcggtctcagtggtgtacggtacaaacccatgagagctctcgtcgtgatccgattgtcccgcgtcaccgatgctacgacttcaccggag

SEQ ID NO: 197 - DNA, 260 bp, Artificial Sequence
  Description of Artificial Sequence: Synthetic polynucleotide
gcactgcggcggaggccgcggcaagaccgagaccgccgatccgtggtgatctaaccccgcataccaagaaaccccctacccggcccgcgaaggctaggtagggggcttttcttgtttcagtgggtatggccgtgatgacctgtgtcttcgtggtttgtctggtcaaccaccgcggtctcagtggtgtacggtacaaacccatgagagccctggtggtcatccgactgtcccgcgtcaccgatgctacgacttcacccgag

SEQ ID NO: 198 - DNA, 260 bp, Artificial Sequence
  Description of Artificial Sequence: Synthetic polynucleotide
ccactgcggcggaggccgcggcaagaccgagaccaccgatccgtggtgatctaaccccgcataccaagaaaccccctacccggcccgcgaaggctaggtagggggctttttgtgtttcagtgggtgtggccgtgatgacctgtgtcttcgtggtttgtctggtcaaccaccgcggtttcagtggtgtacggtacaaacccatgagagccctggtagtcatccgactgtcccgcgtcaccgatgctacgacctcaccggag

SEQ ID NO: 199 - DNA, 260 bp, Artificial Sequence
  Description of Artificial Sequence: Synthetic polynucleotide
gccactgcggcggaggccgcggcaagaccgagaccaccgacccgtggtgatctaaccccgcataccaagaaaccccctacccggcccgcgaaggctaggtagggggcttttcttgtttcagtgggtatggccgtggtgaccaggttcttcgtggtttgtctggtcaaccaccgcggtctcagtggtgtacggtacaaaccatgcgagccctggtagtgatccgcctgtcccgtgtcaccgatgctacgacttcgcccgag

SEQ ID NO: 200 - DNA, 260 bp, Artificial Sequence
  Description of Artificial Sequence: Synthetic polynucleotide
gcactgcggcggaggccgcggcaagaccgagaccaccgatccgtggtgatctaaccccgcataccaagaaaccccctacccggcccgcgaaggctaggtagggggctttttgtgtttcagtgggtgtgtccgtgatgacctgtgtcttcgtggtttgtctggtcaaccaccgcggtctcagtggtgtacggtacaaacccatgagagccctggtagtcatccgactgtcccgcgtcaccgatgctacgacctcaccggag

SEQ ID NO: 201 - DNA, 260 bp, Artificial Sequence
  Description of Artificial Sequence: Synthetic polynucleotide
aaccccgcataccaagaaaccccctacctagccttcgcgggccgggtagggggctttttcgcgttcagggggcctgatcgctcagcgacccatctccgatgggatcgcgtttgttttcagtgggtgtggccgtgatgacctgtgtcttcgtggtttgtctggtcaaccaccgcggtctcagtggtgtacggtacaaacccatgcgcgctttggtagtgatccgcttgtcccgtgtgaccgatgctacgacttcacccgag

SEQ ID NO: 202 - DNA, 260 bp, Artificial Sequence
  Description of Artificial Sequence: Synthetic polynucleotide
cactgcggcggaggccgcggcaagaccgagaccaccgatccgtggtgatctaaccccgcataccaagaaaccccctacctagccttcgcgggccgggtagggggcttttcttgttttcagtgggtatggccgtgatgacctgtgtcttcgtggtttgtctggtcaaccaccgcggtctcagtggtgtacggtacaaacccatgagagccctggtagtgatccgactgtcccgcgtcaccgatgctacgacttcaccggag

SEQ ID NO: 203 - DNA, 260 bp, Artificial Sequence
  Description of Artificial Sequence: Synthetic polynucleotide
gaggtccgctgcggcggaggccgcgcccacaaagaggtcaccgaaacctactgacctcgcataccaagaaaccccctacccggcccgagaaggctaggtagggggctttttgtgtttcagtgggtatggccgtgatgacctgtgtcttcgtggtttgtctggtcaaccaccgcggtctcagtggtgtacggtacaaacccatgagagccctggtagtgatccgactgtcccgcgtcaccgatgctacgacttcaccggag

SEQ ID NO: 204 - DNA, 260 bp, Artificial Sequence
  Description of Artificial Sequence: Synthetic polynucleotide
ctgaagtcgagcaagcccatgaacttcgctctacacgtcccgcagaaggaggcaggatgacgaacccagccccaggttggtacccggaccccgcaggtacaaaccagccgaggtactgggacggaaagaagtgggtgggtgaaccgaccactgtgccggtgaagacgaaccacgcgctgcatctcctgctgacgatcctcaccttctggatgttcggcggctggctgtgggtctggattctcgtcgcaatcgccaaccac

SEQ ID NO: 205 - DNA, 260 bp, Artificial Sequence
  Description of Artificial Sequence: Synthetic polynucleotide
gccactgcggcggaggccgcggcaagaccgagaccaccgatccgtggtgatctaaccccgcataccaagaaaccccctacctagccttcgcgggccgggtagggggcttttcttgtttcagtgggtatggccgtgatgacctgtgtcttcgtggtttgtctggtcaaccaccgcggtctcagtggtgtacggtacaaaccatgcgagccctggtagtgatccgcctgtcccgtgtcaccgatgctacgacttcacccgag

SEQ ID NO: 206 - DNA, 260 bp, Artificial Sequence
  Description of Artificial Sequence: Synthetic polynucleotide
cgctgcggcggaggccgcggcaagaccgagaccaccgacccgtggtgatctaaccccgcataccaagaaacccccctacccggcccgcgaaggctaggtagggggcttttcttgtttcagtgggtgtggccgtgatgacctgtgtcttcgtggtttgtctggtcaaccaccgcggtctcagtggtgtacggtacaaacccatgagagccctggtagtgatccgactgtcccgcgtcaccgatgctacgacttcaccggag

SEQ ID NO: 207 - DNA, 260 bp, Artificial Sequence
  Description of Artificial Sequence: Synthetic polynucleotide
tcactgcggcggcggccgcggcaagaccgagaccaccgatccgtggtgatctaacctcgcgcaccaagaaaccccctacccggcccgcgaaggctaggtagggggctttttgtgtttcagtgggtatggccgtgatgacctgtgtcttcgtggtttgtctggtcaaccaccgcggtctcagtggtgtacggtacaaacccatgagagccctggtagtcatccgactgtcccgcgtcaccgatgctacgacctcaccggag

SEQ ID NO: 208 - DNA, 260 bp, Artificial Sequence
  Description of Artificial Sequence: Synthetic polynucleotide
taaccccgcacaccaagaaaccccctacccggcccgcgaaggctaggtagggggctttttcgcgttcaggggacctgatcgctcagcgacccatctccgatgggatcgcgtttgttttcagtgggtatggccgtgatgacctgtgtcttcgtggtttgtctggtcaaccaccgcggtctcagtggtgtacggtacaaaccatgcgagctctcgtcgtgatccgcttgtcccgtgtcaccgatgctacgacttcaccggag

SEQ ID NO: 209 - DNA, 260 bp, Artificial Sequence
  Description of Artificial Sequence: Synthetic polynucleotide
ccgctgcggcggaggccgcggcaagaccgagaccaccgatccgtggtgatctaaccccgcataccaagaaaccccctacccggcccgcgaaggctaggtagggggctttttgtgtttcagtgggtgtgtccgtgatgacctgtgtcttcgtggtttgtctggtcaaccaccgcggtctcagtggtgtacggtacaaacccatgagagccctggtagtgatccgactgtcccgcgtcaccgatgctacgacctcacccgag

SEQ ID NO: 210 - DNA, 260 bp, Artificial Sequence
  Description of Artificial Sequence: Synthetic polynucleotide
tcactgcggcggaggccgcggcaagaccgagaccaccgatccgtggtgatctaaccccgcataccaagaaaccccctacccggcccgcgaaggccgggtagggggcttttcttgtttcagtgggtatggccgtgatgacccgtgtcttcgtggtttgtctggtcaaccaccgcggtctcagtggtgtacggtacaaacccatgagagctctggtagtcatccgactgtcccgcgtcaccgatgctacgacttcaccggag

SEQ ID NO: 211 - DNA, 260 bp, Artificial Sequence
  Description of Artificial Sequence: Synthetic polynucleotide
agcggtgtccgcggagtcgggcccacccccatatctccctcagcatggagcacaacgtactccaccgccccctccggggaacccgttttgggctccgcggagggggtgttctgcgtttagtgggtgtggccgtgatgacctgtgtcttcgtggtttgtctggtcaaccaccgcggtctcagtggtgtacggtacaaacccatgagagccctggtagtgatccgactgtcccgcgtcaccgatgctacgacttcaccggag

SEQ ID NO: 212 - DNA, 260 bp, Artificial Sequence
  Description of Artificial Sequence: Synthetic polynucleotide
gtcactgcggcggaggccgcggcaagaccgagaccaccgatccgtggtgatctaacctcgcataccaagaaaccccctacccggcccgcgaaggctaggtagggggctttttgtgtttcagtgggtatggtcgtgatgacctgtgtcttcgtggtttgtctggtcaaccaccgcggtctcagtggtgtacggtacaaaccatgcgagctctcgtcgtgatccgcttgtcccgtgtcaccgatgctacgacttcacccgag

SEQ ID NO: 213 - DNA, 260 bp, Artificial Sequence
  Description of Artificial Sequence: Synthetic polynucleotide
gaggtccgctgcggcggcggtcgccacgccaaagaggtcaccgaaacctactgacctcgcataccaagaaaccccctacctagccttcgcgggccgggtagggggcttttcttgtttcagtgggtatggccgtgatgacctgtgtcttcgtggtttgtctggtcaaccaccgcggtctcagtggtgtacggtacaaacccatgagagccctggtagtcatccgcttgtcccgtgtcaccgatgctacgacctcaccggag

SEQ ID NO: 214 - DNA, 260 bp, Artificial Sequence
  Description of Artificial Sequence: Synthetic polynucleotide
ccactgcggcggaggccgcggcaagaccgagacctccgatccgtggcgatctaaccccgcataccaagaaaccccctacccggcccgcgaaggctaggtagggggcttttcttgtttcagtgggtatggccgtgatgacctgtgtcttcgtggtttgtccggtcaaccaccgcggtctcagtggtgtacggtacaaacccatgagagccctggtagtcatccgcctgtcccgcgtcaccgatgctacgacctcgccggag

SEQ ID NO: 215 - DNA, 260 bp, Artificial Sequence
  Description of Artificial Sequence: Synthetic polynucleotide
ccactgcggcggaggccgcggcaagaccgagaccaccgatccgtggtgatctaaccccgcataccaagaaaccccctacccggcccgcgaaggctaggtagggggctttttgtgtttcagtgggtatggccgtgatggcctgtgtcttcgtggtttgtctggtcaaccaccgcggtctcagtggtgtacggtacaaacccatgagagccctggtagtcatccgcctgtcccgtgtcaccgatgctacgacctcaccggag

SEQ ID NO: 216 - DNA, 260 bp, Artificial Sequence
  Description of Artificial Sequence: Synthetic polynucleotide
gcactgcggcggaggccgcggcaagaccgagaccaccgatccgtggtgatctaaccccgcataccaagaaaccccctacccggcccgcgaaggctaggtagggggctttttgtgtttcagtgggtatggccgtgatgacctgtgtcttcgtggtttgtctggtcaaccaccgcggtctcagtggtgtacggtacaaacccatgagagccctggtagtcatccgcctgtcccgcgtcaccgatgctacgacttcaccggag

SEQ ID NO: 217 - DNA, 260 bp, Artificial Sequence
  Description of Artificial Sequence: Synthetic polynucleotide
cccgcataccaagaaaccccctacccggcccgcgaaggctaggtagggggctttttcgcgttcagggggtctgatcgctcagcgacccatctccgatgggatcgcgtttgtgctcttcagtgggtgtggccgtgatgacctgtgtcttcgtggtttgtccggtcaaccaccgcggtctcagtggtgtacggtacaaacccatgagagccctggtagtcatccgcctgtcccgcgtcaccgatgctacgacttcaccggag

SEQ ID NO: 218 - DNA, 260 bp, Artificial Sequence
  Description of Artificial Sequence: Synthetic polynucleotide
agcggtgtccgcggagtcgggcccacccccatatctccctcagcatggagcacaacgtactccaccgcccccctccggggaacccgttttgggctccgcggagggggtgttctgcgtttagtgggtatggccgtgatgacctgtgtcttcgtggtttgtctggtcaaccaccgcggtctcagtggtgtacggtacaaaccatgcgagccctggtagtgatccgactgtcccgcgtcaccgatgctacgacttcaccggag

SEQ ID NO: 219 - DNA, 260 bp, Artificial Sequence
  Description of Artificial Sequence: Synthetic polynucleotide
tggaatggtgagggcggccgcagccctcgacttcgcaatcccccattgatcaatggtacaaaacagccccctcccgggaatccgtttggactcctgagagggggcgttttgcgtttctagtggacgtgcccgtggtggtcgtcggcttcttggcttggccgatcaacaactgccgtctcagtggtgtacggtacaaacccatgagagccttggtagtcatccgactgtcccgcgtcaccgatgctacgacttcacccgag

SEQ ID NO: 220 - DNA, 260 bp, Artificial Sequence
  Description of Artificial Sequence: Synthetic polynucleotide
gcactgcggcggaggccgcggcaagaccgagaccgccgatccgtggtgatctaaccccgcataccaagaaaccccctacccggcccgcgaaggctaggtagggggctttttgtgtttcagtgggtatggtcgtgatgacctgtgtcttcgtggtttgtctggtcaaccaccgcggtctcagtggtgtacggtacaaacccatgagagccctggtagtcatccgcctgtcccgcgtcaccgatgctacgacttcgccggag

SEQ ID NO: 221 - DNA, 260 bp, Artificial Sequence
  Description of Artificial Sequence: Synthetic polynucleotide
cactgcggcggaggccgcggcaagaccgagaccaccgatccgtggtgatctaacccccacataccaagaaaccccctacccggcccgcgaaggctaggtagggggctttttgtgtttcagtgggtgtggccgtgatgacctgtgtcttcgtggtttgtctggtcaaccaccgcggtctcagtggtgtacggtacaaacccatgagagccctggtagtcatccgcctgtcccgcgtcaccgatgctacgacttcgccggag

SEQ ID NO: 222 - DNA, 260 bp, Artificial Sequence
  Description of Artificial Sequence: Synthetic polynucleotide
gccactgcggcggaggccgcggcaagaccgagaccaccgatccgtggtgatctaacctcgcataccaagaaaccccctacccggcccgcgaaggctaggtagggggcttttcttgtttcagtgggtatggccgtggtgaccaggttcttcgtggtttgtctggtcaaccaccgcggtctcagtggtgtacggtacaaaccatgcgagccctggtagtgatccgcctgtcccgtgtcaccgatgctacgacttcgcccgag

SEQ ID NO: 223 - DNA, 260 bp, Artificial Sequence
  Description of Artificial Sequence: Synthetic polynucleotide
cactgcggcggaggccgcggcaagaccgagaccaccgatccgtggtgatctaaccccgcataccaagaaacccccctacccggcccgcgaaggctaggtagggggcttttcttgtttcagtgggtatggccgtgatgacctgtgtcttcgtggtttgtctggtcaaccaccgcggtctcagtggtgtacggtacaaacccatgagagccctggtagtgatccgcctgtcccgcgtcaccgatgctacgacctcaccggag

SEQ ID NO: 224 - DNA, 260 bp, Artificial Sequence
  Description of Artificial Sequence: Synthetic polynucleotide
ccactgcggcggaggccgcggcaagaccgagaccaccgatccgtggtgatctaacctctcataccaagaaaccccctacccggcccgcgaaggctaggtagggggctttttgtgtttcagtgggtatggccgtgatgacctgtgtcttcgtggtttgtctggtcaaccaccgcggtctcagtggtgtacggtacaaacccatgagagccctggtagtgatccgcctgtcccgcgtcaccgatgctacgacctcaccggag

SEQ ID NO: 225 - DNA, 260 bp, Artificial Sequence
  Description of Artificial Sequence: Synthetic polynucleotide
gaggcccgctgcggcggaggccgtgcccacaaagaggtcaccgaaacctactgacctcgcataccaagaaaccccctacctagccttcgcgggccgggtagggggcttttcttgtttcagtgggtatggccgtgatgacctgtgtcttcgtggtttgtctggtcaaccaccgcggtctcagtggtgtacggtacaaacccatgagagccctggtagtcatccgactgtcccgcgtcaccgatgctacgacctcaccggag

SEQ ID NO: 226 - DNA, 260 bp, Artificial Sequence
  Description of Artificial Sequence: Synthetic polynucleotide
tcactgcggcggaggccgcggcaagaccgagaccaccgatccgtggtgatctaaccccgcataccaagaaaccccctacccggcccgcgaaggctaggtagggggctttttgcgtttcagtgggtatggccgtgatgacctgtgtcttcgtggtttgtctggtcaaccaccgcggtctcagtggtgtacggtacaaacccatgcgcgctttggtagtgatccgcctgtcccgcgtcaccgatgctacgacttcacccgag

SEQ ID NO: 227 - DNA, 260 bp, Artificial Sequence
  Description of Artificial Sequence: Synthetic polynucleotide
ccactgcggcggcggccgcggcaagaccgagaccaccgatccgtggtgatctaacctcgcataccaagaaaccccctacccggcccgcgaaggctaggtagggggttttttgtgtttcagtgggtatggccgtgaagacctgtgtcttcgtggtttgtctggtcaaccaccgcggtctcagtggtgtacggtacaaacccatgagagccctggtagtcatccgcctgtcccgcgtcaccgatgctacgacttcaccggag

SEQ ID NO: 228 - DNA, 260 bp, Artificial Sequence
  Description of Artificial Sequence: Synthetic polynucleotide
ctgaagtcgagcaagcccatgaacttcgctctacacgtcccgcagaaggaggcaggatgacgaccccagctccaggttggtacccggaccccgcaggtacaaaccagccgaggtactgggacggaaagaagtgggtgggtgaaccgaccactgtgccagtgaagacgaaccacgcgctgcatctcctcctgacgatcctcaccttctggatgttcggcggttggctgtgggtctggattctcgtcgcaatcgccaaccac

SEQ ID NO: 229 - DNA, 260 bp, Artificial Sequence
  Description of Artificial Sequence: Synthetic polynucleotide
gcactgcggcggaggccgcggcaagaccgagaccaccgatccgtggtgatctaacctcgcataccaagaaaccccctacccggcccgcgaaggctaggtagggggcttttcttgtttcagtgggtgtgaccgtgatgacctgtgtcttcgtggtttgtctggtcaaccaccgcggtctcagtggtgtacggtacaaacccatgagagccctggtagtgatccgactgtcccgcgtcaccgatgctacgacttcaccggag

SEQ ID NO: 230 - DNA, 260 bp, Artificial Sequence
  Description of Artificial Sequence: Synthetic polynucleotide
ctgaagtcgagcaagcccatgaacttcgctctacacgtcccgcagaaggaggcaggatgacgactccagcgccaggttggtacccggaccccgcaggtacaaaccagccgaggtactgggacggaaagaagtgggtgggcgagccgaccactgtgcccgtgaagacgaaccacgctctgcatctcctgctgacgatcctcaccttctggatgttcggcggctggctgtgggtctggattctcgtcgcaatcgccaaccac

SEQ ID NO: 231 - DNA, 260 bp, Artificial Sequence
  Description of Artificial Sequence: Synthetic polynucleotide
gccactgcggcggcggccgcggcaagaccgagaccaccgacccgtggtgatctaacccgcataccaagaaaccccctacccggcccgcgaaggctaggtagggggctttttgtgtttcagtgggtgtgtccgtgatgacctgtgtcttcgtggtttgtctggtcaaccaccgcggtctccgtggtgtacggtacaaacccatgagagccctggtagtgatccgcctgtcccgcgtcaccgatgctacgacttcaccggag

SEQ ID NO: 232 - DNA, 260 bp, Artificial Sequence
  Description of Artificial Sequence: Synthetic polynucleotide
acctcgcataccaagaaaccccctacctagccttcgcgggccgggtagggggctttttcgcgttcagggggcctgatcgctcagcgacccatctccgatgggatcgcgtttgcgtttcagtgggtatggccgtgatgacctgtgtcttcgtggtttgtctggtcaaccaccgcggtctcagtggtgtacggtacaaacccatgagagccctggtagtgatccgcctgtcccgcgtcaccgatgctacgacttcaccggag

SEQ ID NO: 233 - DNA, 260 bp, Artificial Sequence
  Description of Artificial Sequence: Synthetic polynucleotide
cccccgcataccaagaaaccccctacccggcccgcgaaggctaggtagggggctttttcgcgttcagggggtctgatcgctcagcgacccatctccgatgggatcgcgtttgtgcttcagtgggtatggccgtgatgacctgtgtcttcgtggtttgtctggtcaaccaccgcggtctcagtggtgtacggtacaaacccatgagagccctggtagtgatccgcctgtcccgcgtcaccgatgctacgacttcaccggag

SEQ ID NO: 234 - DNA, 260 bp, Artificial Sequence
  Description of Artificial Sequence: Synthetic polynucleotide
gaggtccgatgcggcggaggccgcgcccacaaagaggtcaccgaaacctactgacctcgcataccaagaaaccccctacctagccttcgcgggccgggtagggggctttttgtgtttcagtgggtgtggccgtgatgacctgtgtcttcgtggtttgtctggtcaaccaccgcggtctcagtggtgtacggtacaaacccatgagagccctggtagtgatccgactgtcccgcgtcaccgatgctacgacctcaccggag

SEQ ID NO: 235 - DNA, 260 bp, Artificial Sequence
  Description of Artificial Sequence: Synthetic polynucleotide
ttgaagtcgagcaagcccatgaacttcgctctacacgtcccgcagaaggaggcaggatgacgaccccagctccaggttggtacccggaccccgcaggtacaaaccagccgaggtactgggacggaaagaagtgggtgggtgaaccgaccactgtgccggtgaagacgaaccacgcgctgcatctcctgctgacgatcctcaccttctggatgttcggaggctggctgtgggtctggattctcgtcgcaatcgccaaccac

SEQ ID NO: 236 - DNA, 260 bp, Artificial Sequence
  Description of Artificial Sequence: Synthetic polynucleotide
gcactgcggcggaggccgcggcaagaccgagaccaccgatccgtggtgatctaaccccgcataccaagaaaccccctacccggcccgcgaaggctaggtagggggcttttcttgtttcagtgggtatggccgtgatgacctgtgtcttcgtggtttgtctggtcaaccaccgcggtctcagtggtgtacggtacaaacccatgagagccctggtggtcatccgactgtcccgcgtcaccgatgctacgacttcacccgag

SEQ ID NO: 237 - DNA, 260 bp, Artificial Sequence
  Description of Artificial Sequence: Synthetic polynucleotide
cactgcggcggaggccgcggcaagaccgagaccaccgatccgtggtgatctaaccccgcataccaagaaaccccctacccggcccgcgaaggctaggtagggggctttttgtgttttcagtgggtgtggccgtgatgacctgtgtcttcgtggtttgtctggtcaaccaccgcggtctcagtggtgtacggtacaaacccatgagagccctggtagtgatccgcttgtcccgcgtcaccgatgctacgacttcaccggag

SEQ ID NO: 238 - DNA, 260 bp, Artificial Sequence
  Description of Artificial Sequence: Synthetic polynucleotide
ccactgcggcggaggccgcggcaagaccgagaccaccgatccgtggtgatctaaccccgcataccaagaaaccccctacccggcccgcgaaggctaggtagggggctttttgtgtttcagtgagtatgaccgtgatgacctgtgtcttcgtggtttgtctggtcaaccaccgcggtttcagtggtgtacggtacaaacccatgagagccctggtagtcatccgcttgtcccgcgtcaccgatgctacgacttcaccggag

SEQ ID NO: 239 - DNA, 260 bp, Artificial Sequence
  Description of Artificial Sequence: Synthetic polynucleotide
gaggcccgctgcggcggaggtcgcgcccacaaagaggtcaccgaaacctactgacctcgcataccaagaaaccccctacctagccttcgcgggccgggtagggggctttttgcgtttcagtgggtgtggccgtgatgacctgtgtcttcgtggtttgtctggtcaaccaccgcggtctcagtggtgtacggtacaaacccatgagagccctggtagtcatccgcctgtcccgcgtcaccgatgctacgacctcacccgag

SEQ ID NO: 240 - DNA, 260 bp, Artificial Sequence
  Description of Artificial Sequence: Synthetic polynucleotide
ctgaagtcgagcaagcccatgaacttcgctctacacgtcccgcagaaggaggcaggatgacgaacccagccccaggttggtacccggaccccgcaggtacaaaccagccgaggtactgggacggaaagaagtgggtgggagaaccgaccactgtgccggtgaagacgaaccacgcgctgcatctcctactgacgatcctcaccttctggatgttcggcggctggctgtgggtctggattctcgtcgcaatcgccaaccac

SEQ ID NO: 241 - DNA, 260 bp, Artificial Sequence
  Description of Artificial Sequence: Synthetic polynucleotide
aaccccgcataccaagaaaccccctacccggcccgcgaaggctaggtagggggctttttcgcgttcaggggcctgatcgctcagcgacccatctccgatgggatcgcgtttgtgtttcagtgggtgtggccgtgatgacctgtgtcttcgtggtttgtctggtcaaccaccgcggtctccgtggtgtacggtacaaacccatgagagccctggtagtcatccgcctgtcccgcgtcaccgatgctacgacttcaccggag

SEQ ID NO: 242 - DNA, 260 bp, Artificial Sequence
  Description of Artificial Sequence: Synthetic polynucleotide
cgcataccaagaaagaaaccccctacccggcccgcgaaggctaggtagggggctttttcgcgttcaggggacctgatcgctcagcgacccatctccgatgggatcgcgtttgtgtttcagtgggtatggccgtgatgacctgtgtcttcgtggtttgtctggtcaaccaccgcggtctcagtggtgtacggtacaaacccatgagagccctggtagtcatccgactgtcccgcgtcaccgatgctacgacttcaccggag

SEQ ID NO: 243 - DNA, 260 bp, Artificial Sequence
  Description of Artificial Sequence: Synthetic polynucleotide
acctcgcacaccaagaaaccccctacccggcccgcgaaggctaggtagggggctttttcgcgttcaggggacctgatcgctcagcgacccatctccgatgggatcgcgtttgtgtttcagtgggtatggccgtgatgacctgtgtcttcgtggtttgtctggtcaaccaccgcggtctcagtggtgtacggtacaaacccatgagagccctggtagtgatccgcctgtcccgcgtcaccgatgctacgacttcgccggag

SEQ ID NO: 244 - DNA, 260 bp, Artificial Sequence
  Description of Artificial Sequence: Synthetic polynucleotide
ggcactgcggcggaggccgcggcaagaccgagaccaccgacccgtggtgatctaaccccgcataccaagaaaccccctacccggcccgcgaaggctaggtagggggcttttcttgtttcagtgggtatggccgtgatgacctgtgtcttcgtggtttgtctggtcaaccaccgcggtctcagtggtgtacggtacaaaccatgcgagctctcgtcgtgatccgcttgtcccgtgtcaccgatgctacgacctcaccggag

SEQ ID NO: 245 - DNA, 260 bp, Artificial Sequence
  Description of Artificial Sequence: Synthetic polynucleotide
gcactgcggcggaggccgcggcaagaccgagaccaccgatccgtggtgatctaaccccgcataccaagaaaccccctacccggcccgcgaaggctaggtagggggctttttgtgtttcagtgggtgtggccgtgatgacctgtgtcttcgtggtttgtctggtcaaccaccgcggtctcagtggtgtacggtacaaacccatgagagccctggtagtgatccgactgtcccgcgttaccgatgctacgacctcaccggag

SEQ ID NO: 246 - DNA, 260 bp, Artificial Sequence
  Description of Artificial Sequence: Synthetic polynucleotide
ggggcaatcacgttccacttccagataccagaagacctccacgagcgcctagcctcttaaacgacgaaagccccctcccggttaggggagggggaatcgtgtctagatcaatgtcaggttgagcgcggacgagtccacgtttcgagcggacgtacggttggtgccagtggtgtacgcctggacctcgaccacgtcgccttcgtagaacctgtacggtccggtttccagggtcacagcccaaccaccggttgtgaatgtgc

SEQ ID NO: 247 - DNA, 260 bp, Artificial Sequence
  Description of Artificial Sequence: Synthetic polynucleotide
gctacgtcggcgggttcggatcactgggccagcatcttcgtgccgttctgatcaccccgaataccaagaaaccccctacccggcccgcgaaggctaaggtagggggctttttgtgtttcagtgggtatggccgtggtgaccaggttcttcgtggtttgtccggtcaaccactgcggtctcagtggtgtacggtacaaaccatgcgagctctcgtcgtgatccgcttgtcccgtgtcaccgatgctacgacctcaccggag

SEQ ID NO: 248 - DNA, 260 bp, Artificial Sequence
  Description of Artificial Sequence: Synthetic polynucleotide
gcggtgtccgcggagtcgggcccacccccatatctccctcagcatggagcacaacgtactccaccgccccctccggggaacccgttttgggctccgcggagggggtgttctgcgtttcagtgggtatggccgtgatgacctgtgtcttcgtggtttgtccggtcaaccactgcggtctcagtggtgtacggtacaaacccatgagagccctggtagtcatccgactgtcccgcgtcaccgatgctacgacctcaccggag

SEQ ID NO: 249 - DNA, 260 bp, Artificial Sequence
  Description of Artificial Sequence: Synthetic polynucleotide
gctttttcgcgttcagggggtcctgatcgctcagcgacccatctccgatgggatcgcgttttcagtgggtatggccgtgatgacctgtgtcttcgtggtttgtctggtcaaccaccgcggtctcagtggtgtacggtacaaacccaaggcctggagcgaagctccggccgtaagcgtcgatcgtccgaaggagatctagcgtgagagctcttgtcgtgatccgcctgtcccgtgtcaccgatgctacgacctccccggag

SEQ ID NO: 250 - DNA, 260 bp, Artificial Sequence
  Description of Artificial Sequence: Synthetic polynucleotide
ggtgctctccagaccgagatcaagttcccaggtgacgtagaggaacgcctggcctcttaaacgacgaaaaccccctcccggttaagggagggggaatcgtgtcaaaccaggttaacgctcagcgaggacgagtccacgtttcgagccgacgtacggttggtgccagtggtgtaagcctggacctccaccacatcgccgtcatagaaccggtacgggccggtctccagagtgaccgaccagccgttgttggagaacgagcc

SEQ ID NO: 251 - DNA, 260 bp, Artificial Sequence
  Description of Artificial Sequence: Synthetic polynucleotide
ggggtgctccactccaactggatcgagcccaccgacatcgaggaacgcctactcgcctgaaacgcaaaaaagcccccctcccggagcccgaaggccctgagaggggggtttctttgtcagccgactcgcaccatggagaaccacgagtccgacgtgtcagcaccaccgacgatgttgacatcgcctgagttatacaggcccggtcgaaccgtcgcgcccgcaggcaggtagtacatcacgccgtcaccgccgacagagtc

SEQ ID NO: 252 - DNA, 260 bp, Artificial Sequence
  Description of Artificial Sequence: Synthetic polynucleotide
ggcgtcatcgtcgcgaactggatcgagccgcacgacatcgagaagcgcctggcttcctgacggtcgctatgccaggctgctgactcacagcatccatacagggataggagacctgatgcatgtgaacgtcccgcctgcccggaagccagcgcccaacccgctgttcctcaccctcgcgatcctgtcggggttcccgaccgcgttcttcctcatcctcttcgtgtccggtggcacctcggtcttcgtcatgatcgggttcc

SEQ ID NO: 253 - DNA, 260 bp, Artificial Sequence
  Description of Artificial Sequence: Synthetic polynucleotide
ggtgctctccagaccgagatcaagttcccaggtgacgtagaggaacgcctagcctcttaaacgacgaaaaccccctcccggttaagggagggggaatcgtgtcaaaccaggttaacgctcagcgaggacgagtccacgtttcgagccgacgtacggttggtgccagtggtgtaagcctggacctccaccacatcgccgtcatagaaccggtacgggccggtctccagagtgaccgaccagccgttgttggagaacgagcc

SEQ ID NO: 254 - DNA, 260 bp, Artificial Sequence
  Description of Artificial Sequence: Synthetic polynucleotide
ggtgtcatcgttgcgaactggatcgagccacacgacatcgagaagcgcctggcctcttgaccgttcgtgtgccaggctcctcggtgccatgcaccactcagggataggagacctgatgtacgcgaatgtcccaccgcccgtgccgttccagcctcagcggaaggcggcaccgaacccgctgttcctcgtcctcgcgatcctgtcgtccctgccgactgcattcttcgtactctgcttcatcttgtccccctcgatgctgt

SEQ ID NO: 255 - DNA, 260 bp, Artificial Sequence
  Description of Artificial Sequence: Synthetic polynucleotide
ggtgctctccagaccgagatcaagttcccaggtgacgtagaggaacgcctagcctcttaaacgacgaaagccccctcccggttaagggagggggaatcgtgtcagaccaggttcaggttgagcgcggacgagtccacgtttcgagcggacgtacggttggtgccagtggtgtacgcctggacctcgatcacgtcaccgtcgtagaacctgtacggcccggtatccagggtcacagcccagccgttgttggagaacgagcc

SEQ ID NO: 256 - DNA, 260 bp, Artificial Sequence
  Description of Artificial Sequence: Synthetic polynucleotide
ggtgtcatcgtcgcgaactggatcgagccacacgacatcgagaagcgcctggcctcttgaccgttcgtgtgccaggctcctcggtgccatgcaccattcagggataggagacctgatgcacgcgaatgtcccaccgcccgtaccgttccagccgccgcagcgcaaggcggcaccgaatccgctgttcctcgtcctcgcgatcctgtccgcaatcccgaccgcattcttcgtgttcgcgctcatcgccgcgccgacgatgc

SEQ ID NO: 257 - DNA, 260 bp, Artificial Sequence
  Description of Artificial Sequence: Synthetic polynucleotide
ggtgctctccagaccgagatcaagttcccaggtgacgtagaggaacgcctagcctcttaaacgacgaaaaccccctcccggttaagggagggggaatcgtgtcaaaccaggttaacgctcagcgaggacgagtccacgtttcgagcagacgtacggttggtgccagtggtgtaagcctggacctccaccacatcgccgtcatagaaccggtacgggccggtctccagagtgaccgaccagccgttgttggagaacgagcc

SEQ ID NO: 258 - DNA, 260 bp, Artificial Sequence
  Description of Artificial Sequence: Synthetic polynucleotide
ggcgcactccagaccgagatcaagttcccaggggatgtagaggaacgcctagcctcgtaaacgacgaaagccccctcccggttaagggagggggaatcgtgtctagaccaggttcaggttgagcgcggacgagtccacgtttcgagcggacgtacggttggtgccagtggtgtaagcctggacctcgatcacgtcaccgtcgtagaacctgtacggcccggtatccagggtcactgaccagccgttgttggaaaacgagc

SEQ ID NO: 259 - DNA, 260 bp, Artificial Sequence
  Description of Artificial Sequence: Synthetic polynucleotide
ggcgtcatcgtcgcgaactggatcgagccgcacgacatcgagaagcgcctggcttcctgacggtcgctatgccaggctgctgactcacagcatccatacagggataggagacctgatgcatgtgaacgtcccgcctgcccggaagccagcgcccaacccgctgttcctcaccctctcgatcctgtcgggattcccgaccgcgttcttcctgctgctcttcgtgaccggtggcacctcgatcttcgtcatgatcgggttcc

SEQ ID NO: 260 - DNA, 260 bp, Artificial Sequence
  Description of Artificial Sequence: Synthetic polynucleotide
ggtgctctccagaccgagatcaagttcccaggtgacgtagaggaacgcctagcctcttaaacgacgaaaaccccctcccggttaagggagggggaatcgtgtcaaaccaggttaacgctcagcgaggacgagtccacgtttcgagcagacgtacggttggtgccagtggtgtaagcctggacctccaccacgtcaccgtcgtagaacctgtacgggccggtctccagagtgaccgaccagccgttgttggagaacgtacc

SEQ ID NO: 261 - DNA, 260 bp, Artificial Sequence
  Description of Artificial Sequence: Synthetic polynucleotide
ggcgcactccagaccgagatcaagttcccaggggatgtagaggaacgcctagcctcgtaaacgacgaaagccccctcccggttaggggagggggaatcgtgtctagatcaaggtcaggttgagcgcggacgagtccacgtttcgagcggacgtacggttggtgccagtggtgtacgcctggacctcgatcacgtcgccttcgtagaacctgtacggcccggtatccagggtcacagcccagccgttgttggagaacgagc

SEQ ID NO: 262 - DNA, 260 bp, Artificial Sequence
  Description of Artificial Sequence: Synthetic polynucleotide
ggtgtgctggagtttcacctgaaggtccccgaggacgtgagagaacgcctctccgcttaaacgcaaaaaagccccctcccaagacatttcgtcctgagagggggtttcttcttagatcacgtcatatccgacctgcctcagagcttcatcgtgaggcgtgccggacagcagcgtatagagccggtccatgctcgtcgcaacgccgttctcgtcgcactccacgacgacggtaggcgaaacaaccaccgcgtgttgaccga

SEQ ID NO: 263 - DNA, 260 bp, Artificial Sequence
  Description of Artificial Sequence: Synthetic polynucleotide
ggtgtgctggagttccacctgaaggtccccgaggacgtgagagaacgcctctccgcttaaacgcaaaaaagccccctcccaagacatttcgtcctgagagggggtttcttcttagatcacgtcatatccgacctgcctcagagcttcatcgtgaggcgtgccggacagcagcgtatagagccggtccatgctcgtcgcaacgccgttctcgtcgcactccacgacgacggtaggcgaaacaaccaccgcgtgttgaccga

SEQ ID NO: 264 - DNA, 260 bp, Artificial Sequence
  Description of Artificial Sequence: Synthetic polynucleotide
ggtgtgctggagttccacctgaaggtccccgaggacgtgagagaacgcctctccgcgtaaacgcaaaaaagccccctcccaagacatttcgtcctgagagggggtttcttcttagatcacgtcatatccgacctgcctcagagcttcatcgtgaggcgtgccggacagcagcgtatagagccggtccatgctcgtcgcaacgccgttctcgtcgcactccacgacgacggtaggcgaaacaaccaccgcgtgttggccga

SEQ ID NO: 265 - DNA, 260 bp, Artificial Sequence
  Description of Artificial Sequence: Synthetic polynucleotide
ggtgtgctggagttccacctgaaggtccccgaggacgtgagagaacgcctctccgcgtaaacgcaaaaaagccccctcccaagacatttcgtcctgagagggggtttcttcttagatcacgtcatatccgacctgcctcagagcttcatcgtgaggcgtgccggacagcagcgtatagagccggtccatgctcgtcgcagcgccgttctcgtcgcactccacgacgacggtaggcgaaacaaccaccgcgtgttgaccga

SEQ ID NO: 266 - DNA, 260 bp, Artificial Sequence
  Description of Artificial Sequence: Synthetic polynucleotide
ggtgtgctggagttccacctgaaggtccccgaggacgtgagagaacgcctctccgcttaaacgcaaaaaagccccctcccaagacatttcgtcatgagagggggtttcttcttagatcacgtcatatccgacctgcctcagagcttcatcgtgaggcgtgccggacagcagcgtatagagccggtccatgctcgtcgcaacgccgttctcgtcgcactccacgacgacggtaggcgaaacaaccaccgcgtgttggccga

SEQ ID NO: 267 - DNA, 260 bp, Artificial Sequence
  Description of Artificial Sequence: Synthetic polynucleotide
ggtgtgctggagttccacctgaaggtccccgaggacgtacgagaacgtctctccgcttaaacgcaaaaaggccccctcccaagacatttcgtcctgagagggggtttcttcttagatcacgtcatatccgacctgcctcagagcttcatcgtgaggcgtaccggacagcagcgtatagagccggtccatgctcgtcgcaacgccgttctcgtcgcactccacgacgacggtaggcgaaacaaccaccgcgtgttgaccga

SEQ ID NO: 268 - DNA, 260 bp, Artificial Sequence
  Description of Artificial Sequence: Synthetic polynucleotide
gagttaaagtcgagcaagccggtgatgagcttcgccatgttcgagtcctccacctcttaaacgcaaaaaagcccccctccaaggacattgagtcccgagaggggggtttctttgttatgcgagagagcggttgatcatgattgcggcgaaccacgtcttcgagccactggcatctccgatgagagtcccagcgttggtcgacccgagggctcccgcagcggtcagatcgcaagcggggcggatcttgtcaccggccacgc

SEQ ID NO: 269 - DNA, 260 bp, Artificial Sequence
  Description of Artificial Sequence: Synthetic polynucleotide
ccgcggcaaggtcgagaccaccgatccgtggtgatctaacctcgcataccaagaaaccccctacccggcccgcgaaggctaggtagggggctttttgtgtttcagtgggtatggccgtgatgacctgtgtcttcgtggtttgtccggtcaaccaccgcggtctcagtggtgtacggtacaaacccatgagagccctggtagtgatccgactgtcccgcgtcaccgatgctacgacctcaccggagcgtcagctggagtct

SEQ ID NO: 270 - DNA, 260 bp, Artificial Sequence
  Description of Artificial Sequence: Synthetic polynucleotide
gccgcggcaagaccgagaccaccgatccgtggtgatctaaccccgcataccaagaaaccccctacctagccttcgcgggccgggtagggggcttttcttgtttcagtgggtatggccgtgatgacctgtgtcttcgtggtttgtctggtcaaccaccgcggtctcagtggtgtacggtacaaaccatgcgagccctggtagtgatccgcctgtcccgtgtcaccgatgctacgacttcacccgagcgtcagctggagtct

SEQ ID NO: 271 - DNA, 260 bp, Artificial Sequence
  Description of Artificial Sequence: Synthetic polynucleotide
cccagctcatcatcgagccgggggccttttgcgtacccgctacgcgccgaggagcgccgtctggagcgtatcgaggccgacgccgccgaggtccagggccgccttgtgaaaggccttctccgagaacgccgcgccctcccgggccgccatctcatcatgtattttttgccagatacgttgaccgaccttacgatagaaacatgaccacacgagccgccatctaccttcgtatctctgaggacaagacgggcgaggagaag

SEQ ID NO: 272 - DNA, 260 bp, Artificial Sequence
  Description of Artificial Sequence: Synthetic polynucleotide
ggtgccctccagttcaatctccgagtgccagccgatgcacaagagcgcctagcctcctaaacgacgaaagccccctcccggttaagggagggggaatcgtgtcagaccagggtcaggttgagcgcggacgaatccacgtttcgagcggacgtgcggttggtaccggtggtgtaagcctggacctcgaccacgtcaccttcgtagaacctgtacggcccactatccagggtcactgcccatccacctgtagtgaacgagcc

SEQ ID NO: 273 - DNA, 260 bp, Artificial Sequence
  Description of Artificial Sequence: Synthetic polynucleotide
ccgcggcaagaccgagaccaccgatccgtggtgatctaaccccgcataccaagaaaccccctacccggcccgcgaaggctaggtagggggctttttgtgtttcagtggatatgaccgtgatgacctgtgtcttcgtggtttgtctggtcaaccaccgcggtctcagtggtgtacggtacaaacccatgagagccctggtagtgatccgcctgtcccgcgtcaccgatgctacgacttcgccggagcgtcagctggagtct

SEQ ID NO: 274 - DNA, 260 bp, Artificial Sequence
  Description of Artificial Sequence: Synthetic polynucleotide
ccgcggcaagaccgagaccaccgatccgtggtgatctaaccccgcataccaagaaaccccctacccggcccgcgaaggctaggtagggggctttttgtgtttcagtgggtgtggccgtgatgacctgtgtcttcgtggtttgtctggtcaaccaccgcggtctcagtggtgtacggtacaaacccatgagagccctggtagtgatccgactgtcccgcgttaccgatgctacgacctcaccggagcgtcagctggagtct

SEQ ID NO: 275 - DNA, 260 bp, Artificial Sequence
  Description of Artificial Sequence: Synthetic polynucleotide
ggggtcttacacttcgacctacgaataccggaagacatcttagaaaggatggcggggtgagcgctccagggtggtatccagatcctgctgggtcagggggccagaggtactgggacggccaacggtgggcaccgcaagctgttcacgcccagcaggtggtaacagggccgaaccacgttctgcacctgatccttaccatcctgacgttctggttcttcggtggctggatctgggtgtggctcgtcgtggcgctgtccaac

SEQ ID NO: 276 - DNA, 260 bp, Artificial Sequence
  Description of Artificial Sequence: Synthetic polynucleotide
ggggtcttacacttcgacctacgaataccggaagacatcttagaaaggatgagcgcgtgacagcgcctatcgccacgcctggttggtacccagacccttcgggctctggaggagaacggtactgggacggacaagcctggacggtgactcgaccggccccgcaaccgaagagaatcacggtcaactacgggttcgcgctgctcgcggtgttctcgctgctcggaacgttgtttttcggcttacctctggtaagcaacgga

SEQ ID NO: 277 - DNA, 260 bp, Artificial Sequence
  Description of Artificial Sequence: Synthetic polynucleotide
ggggtcttacacttcgacctacgaataccggaagacatcttagaaaggatgagcgcgtgacagcgcctatcgccacgcctggttggtacccagacccttcgggctctggaggagaacggtactgggacggacaagcctggacggtgactcgaccggccccgcaaccgaagagaatcacggtcaactacgggttcgcgctgctcgcggtgttctcgctgctcggaacgttgtttttcggcataccgctggtaagcaacgga

SEQ ID NO: 278 - DNA, 260 bp, Artificial Sequence
  Description of Artificial Sequence: Synthetic polynucleotide
ggggtcttacacttcgacctacgaataccggaagacatcttagaaaggatggcggggtgagcgctccagggtggtatccagatcctgctgggtcagggggccagaggtactgggacggccaacggtgggcaccgcaagctgttcacgcccagcaggtggtaacagggccgaaccacgttctgcacctgatccttaccatcctgacgttctggttcttcggtggctagatctgggtgtggctcgtcgtggcgctgtccaac

SEQ ID NO: 279 - DNA, 260 bp, Artificial Sequence
  Description of Artificial Sequence: Synthetic polynucleotide
ggtgccgtcacgttccacttccacatcccggaagacctccacgagcgcatagcgtcctgatacacgaaaagccccctcccgcaatgggagggggtctttctgtgtttagaggtctccagcttcgatccagtcgatgccaggggacgaatactggatctggaagatctggtcgttggactcgatacagaagccccagcttcgtcgggtctcaccaacggggacgatccccgtggagtcggtccaggagatgaacgacgagc

SEQ ID NO: 280 - DNA, 260 bp, Artificial Sequence
  Description of Artificial Sequence: Synthetic polynucleotide
ggcgtcatcgtcgcgaactggatcgagccacacgacatcgagaagcgcctggcttcctgacggtcgctatgccaggctgctgactcacagcatccatacagggataggagacctgatgcatgtgaacgtcccgccgcccggattcgtcccgcccgcacggaaacccagccccaatccgctgttcctcaccctctcgattctgtcggggttcccggccgcactgttcctgatcctctttgtgtccggtgcgacctcgatcc

SEQ ID NO: 281 - DNA, 260 bp, Artificial Sequence
  Description of Artificial Sequence: Synthetic polynucleotide
ggtgtcatcgttgcgaactggatcgagccacacgacatcgagaagcgcctggcgtcctgaccacttctatgccaggctgctcgctcacagcatccatacagggataggagacctgatgcatgtgaacgtcccgccgcccggattcgtcccgcccgcacggaaacccagccccaatccgctgttcctcaccctctcgatcctgtcggggttcccggccgcgctgttcctgatcctcttcgtctccggtgcgacctcggtcc

SEQ ID NO: 282 - DNA, 260 bp, Artificial Sequence
  Description of Artificial Sequence: Synthetic polynucleotide
aaaatgttaaagggggcgaatttaaatactttgaatggtatcgcaattcaaattggcgatgctttttacatcgtttacgatgagaaattgagtgatggcgagaagaaaaaaattattgatcatttacaaaacaaaatcaaatcaaacaaatttgattatatacttaccgacaatgatatcattgaaagtgaggaaagaaaatgcaaagtgaattagaagagcgaaagaaagcatttgtatatgttagagtatctacttat

SEQ ID NO: 283 - DNA, 260 bp, Artificial Sequence
  Description of Artificial Sequence: Synthetic polynucleotide
tttttatagagggggttcttttttgtttttgtttttactagatgttgttgtgtattgtttaccccctcctaaatttttgagatttatatatttttattttgacgactgtagaaagtcgtctttttacattggtaatagattgccagtatatccggagggctatatactgtagtcataagaatttagtaagaggatgaggtgtgtacgaattgaaatatgctgtatatgtacgtgtatcaacggatagagacgaacaagtt

SEQ ID NO: 284 - DNA, 260 bp, Artificial Sequence
  Description of Artificial Sequence: Synthetic polynucleotide
gaacagattatcgtttataaagataagtatattgaagtaaaattcaaacagtttgaataatacgtgtttttactaatccatttaatgcggggtggggctaccaatcaatataagtatttttacttatagaacgaactgctctgatagatccagagcagttcttttttatttacaatatctttatcatttcttcacttttagctatatcatccggactaacaaattcaagattttgttttatatcaactccagcatcgtga

SEQ ID NO: 285 - DNA, 260 bp, Artificial Sequence
  Description of Artificial Sequence: Synthetic polynucleotide
ggggcgttgacgttcgatctcgttgtccccgaggatctccgggaacgaatcaccctgtaacgcaaaaaaggcccccctcctgggatcaccaggagaggggccaattgctcattcgactgtgtagccgagttcggccagggcatcctcgtgggatgtccctggcgctgccttgtgtacaggggtcaggctggtagcgattccttcgtcgttgcactcgaagatgaccgtgggtcgtacgacgtgcttgagggcctgtcggc

SEQ ID NO: 286 - DNA, 260 bp, Artificial Sequence
  Description of Artificial Sequence: Synthetic polynucleotide
ggggcattgtcgttcgatctcgttgtgccagaggatcttctggcacgaatgtccgtgtaacgcaaaaaagccccctcccggggatcacccaggagggggccattgctcattcgactgtgtagccgaggacggcgagggcatcctcgtgggatgtccctgccgggaatcggttgatcggagtgaggctggtagcgataccctcctcgttgcactcgaagacgaccgtgggtcgcacgatctccttcagcgcctgcctgccg

SEQ ID NO: 287 - DNA, 260 bp, Artificial Sequence
  Description of Artificial Sequence: Synthetic polynucleotide
ttatgcggggcggcgatattaaggtcaatactgcccttgaactcgctcgtgagcggttcggcggcagtcttcgctcattatatcgttggtggaagctgatcgaacaccaagatcgcgccgattggttggctgctgttgctccgtccttttcggctgatgaaagccgttcaccttgcgatgacgcggcttgggattttctcatgtcagactatttgcgctcggagaagccgagcttctccgcctgctatcggcgcatggtg

SEQ ID NO: 288 - DNA, 260 bp, Artificial Sequence
  Description of Artificial Sequence: Synthetic polynucleotide
ggagcgttctacttcgatctcgttgtcccagaggatctccgggagcgaatgtccctctaacgcaaaaaagccccctcccggggatcacccaggagggggccattgcttactcgacggtgtagccgagaacggcgagggcatcctcgtgggatgtccctgccgggaatctgttgatcggggtcaagctggtagcgataccctcttcgttgcaggcgaagacgaccgtgggtcgaacgacctccttcagcgcctgcctgccg

SEQ ID NO: 289 - DNA, 260 bp, Artificial Sequence
  Description of Artificial Sequence: Synthetic polynucleotide
gccaagctgccgcttggccacaacatcgacatctactggcataagcccagcgatgactgagatccggttgacctgagtgtcagtcaagggtgggctgtcagcgttctcgcgacgtatggcagcccactcttcttctgtcagaccgagactggccatcagatctcctccatcttcaggttcggccagcagtaatgcacgaaccccatctcgtcctggaccacgacctcgccgtcgtcgctgaagctcagcagcgtgccggt

SEQ ID NO: 290 - DNA, 260 bp, Artificial Sequence
  Description of Artificial Sequence: Synthetic polynucleotide
gccaagctgccgcttggccacaacatcgacatctactggcataagcccagcgatgactgagatccggttgacctgagcgtcagtcaagggtgggctgtcagcgttctcgcgacgtatggcagcccactcttcttctgtcagaccgagactggccatcagatctcctccatcttcaggttcggccagcagtaatgcacgaaccccatctcgtcctggaccacgacctcgccgacgaacggggcctcagtgatcgccatcgt

SEQ ID NO: 291 - DNA, 89 bp, Artificial Sequence
  Description of Artificial Sequence: Synthetic oligonucleotide
tcaaaggttgatgttactgctgataatgtagatatcatatttaaattccaactcgcttaattgcgagtttttatttcgtttatttcaat

SEQ ID NO: 292 - DNA, 260 bp, Artificial Sequence
  Description of Artificial Sequence: Synthetic polynucleotide
gatcttgtggaaaaggtggagtgtgactgtggagagataaatgtgattctgaaaatctaacgaccatttctgccagtatttttaaagattgtggggacattttagttatgaactggaatgtcccaccattttacaccactttaggcgaagcgtatcgactagatacaaagaagatgagcatcgctaggttttgtagctggtgtgataggtacaccagctaaattagacaaaacataatgaattggggcagacacactctc

SEQ ID NO: 293 - DNA, 260 bp, Artificial Sequence
  Description of Artificial Sequence: Synthetic polynucleotide
ctgtcttcgcagaaaaagcaaataaaattagaagtacttttgaaggttatttttatagaattgttgaaagtaaatttgtaatggagagaaggaaagaatgtcgaggattattgttcgattggttaaatgaataatataaaattgcccacagggaaaaatatatatataatttaattatcatattcttagtaaataagtgggtgaaaattttgaaatacgctgtttatgtacgagtttcaacggatagagatgagcaagtt

SEQ ID NO: 294 - DNA, 260 bp, Artificial Sequence
  Description of Artificial Sequence: Synthetic polynucleotide
gtcttcgcagaaaaagcaaataaaattagaagtacttttgaaggttatttttatagaattgttgaaagtaaatttgtaatggagagaaggaaagaatgtcgaggattattgttcgattggttaaatgaataatataaaattgcccacagggaaaaatatatatatataatttaattatcatattcttagtaaataagtgggtgaaaattttgaaatacgctgtttatgtacgagtttcaacggatagagatgagcaagtt

SEQ ID NO: 295 - DNA, 260 bp, Artificial Sequence
  Description of Artificial Sequence: Synthetic polynucleotide
gccaaactgcccctcggtcacgccatcaagatccactggcatgatcccagcaacgactgagatccggttcacctgacggtcactgaggggtgggctggcggcgacttcgcgtcgtactgccgcccactcctcttccgtcccaccgaggctcactggatctccaccgtttcgaggttcggccagcagtagtgcgggatcccgctgtcgtcctgcaccacgacctcaccgtcaacggtgaagctgagcagcttgcccaccgc

SEQ ID NO: 296 - DNA, 260 bp, Artificial Sequence
  Description of Artificial Sequence: Synthetic polynucleotide
gccaaattgcccctgggtcacgccatcaagatccactggcatgatcccagcaatgactgagatccggttgatctgacggtcattgaggggtgggctggcggcgacctcgcgtcgtactgccgcccactcctcttccgtcccgccgaggctcatgggatggccaccgtttcgaggttcggccagcagtagtgcgggatcccgccgtcatcctgcacaacgacctcgccgtcagtggtgaagctgagcagcttgcccaccgc

SEQ ID NO: 297 - DNA, 260 bp, Artificial Sequence
  Description of Artificial Sequence: Synthetic polynucleotide
gccaaactgcccctcggtcacgccatcaagatccactggcatgatcccagcaacgactgagatccggttcacctgacggtcactgaggggtgggctggcggcgacctcgcgtcgtactgccgcccactcctcttccgtcccaccgaggctcactggatttccaccgtctcgaggttcggccagcagtagtgcgggatcccactgtcgtcctgcaccacgacctcaccgtcaacggtgaagctgagcagctttcccaccgc

SEQ ID NO: 298 - DNA, 260 bp, Artificial Sequence
  Description of Artificial Sequence: Synthetic polynucleotide
gaaaagatagaagttgcaagtgacggatatatcaagattatagataaagatatattatgacatgtataatccatacttgtatggaaaggttcggcttcccgtggggctaccatgcgtaatccatacttgtatggaaaacggcagtgctgaagttattaatcggcactgcctttattttaaattacaatatctttatcatttcttcacttttagctatatcatccggactaacaaattcaagattttgttttatatcaact

SEQ ID NO: 299 - DNA, 260 bp, Artificial Sequence
  Description of Artificial Sequence: Synthetic polynucleotide
ctgtcatcttgcctgttcaccgccctgtctggctaacggagttccttcaaactccgcgcatccgaagtttgacacaagtacgtactccagcgctagtctctccccactggaacgagggggttgaggtgctgtcacgcgacctgccactagcagggtactgccggatctcagacgcagacctagcagacatcagaagagccttgaggaacggagacatcaccccagaggaagccgcggaactggagaggaagggggtcctc

SEQ ID NO: 300 - DNA, 260 bp, Artificial Sequence
  Description of Artificial Sequence: Synthetic polynucleotide
ctatttttgcagaaaaagcaaataaaattaaaaatacttttgaaggttatttttatagaattgttgaaagtaaatttgtagtcgagagaaggaaagaatgtcgaggattattgtttgattggttaaatgaataacataaaattgcccacagggaaaaatttatatataatttaattatcatattcttagtaaataagtgggtggaaattttgaagtacgctgtttatgtacgagtttcaacggatagggatgagcaagtt

SEQ ID NO: 301 - DNA, 60 bp, Artificial Sequence
  Description of Artificial Sequence: Synthetic oligonucleotide
acgttaataaagaaagttgatgtcacaaaagaggatatcaaaattatttttgatttttag

SEQ ID NO: 302 - DNA, 60 bp, Artificial Sequence
  Description of Artificial Sequence: Synthetic oligonucleotide
gtttttgtaaaatcaggatatattaaaatagagtggaaaattcctttcaaaaaagcgtga

SEQ ID NO: 303 - DNA, 60 bp, Artificial Sequence
  Description of Artificial Sequence: Synthetic oligonucleotide
gtttttgtaaaatcaggatatattaaaatagagtggaaaattcctttcaaaaaaatgtga

SEQ ID NO: 304 - DNA, 60 bp, Artificial Sequence
  Description of Artificial Sequence: Synthetic oligonucleotide
gtttttgtcaaatccgggcatatcaaaattgagtggaaaatacctttcaaaaaagcgtga

SEQ ID NO: 305 - DNA, 60 bp, Artificial Sequence
  Description of Artificial Sequence: Synthetic oligonucleotide
acgttaataaaaaaagttgatgtcacaaaagaggatatcaaaattatttttgatttttag

SEQ ID NO: 306 - DNA, 60 bp, Artificial Sequence
  Description of Artificial Sequence: Synthetic oligonucleotide
accttaatcaacaaggtacaggtcacggatgaggacattgctatcaagtggaagatataa

SEQ ID NO: 307 - DNA, 260 bp, Artificial Sequence
  Description of Artificial Sequence: Synthetic polynucleotide
gcatttgttcgtaaggtttctgttacatcagacaatatagaaatatcttggaacttttagcgtacaaaacaaacatatttactatacgctatttcaatgaagtatatttaatatatttaaataggaagaaaaaaagacccaaccagaaattaatctgattgggtcttttagcatacttgtgctggttgagggcaaatagatatgcttgctattttatgatgcttcaccaacaccttgacgattataataaataattttct

SEQ ID NO: 308 - DNA, 60 bp, Artificial Sequence
  Description of Artificial Sequence: Synthetic oligonucleotide
tcattgatagataagattttagtcaagaaaggttttattaaaatcctatggaaaatttag

SEQ ID NO: 309 - DNA, 260 bp, Artificial Sequence
  Description of Artificial Sequence: Synthetic polynucleotide
acacttatcgaaagaataaaaccaactgtttccaaaatggaaataattgcaaacaaaaaaagccccacgctctcaaaactttggcgagtctgagcgtgaggcatgtgacaggaaaagattttcatggagataacctctcatgatgtcttttcttgtacccattttatcattttttaggaaattttgaaagaggtactactatgataacaacaaataaagtagctatatatgtcagggtatcgacgacaaaccaggttgag

SEQ ID NO: 310 - DNA, 260 bp, Artificial Sequence
  Description of Artificial Sequence: Synthetic polynucleotide
agatccataacgtgatggtagccgtatttgatacggctacttttctttttatctagcaactgtttccattttggaaacaactcaaaaaagccccacgctcagaagtttggcgaccgagagcgtgaggctaggagcaagaaaaaagcattaaaaagctgtttttcttgtacctattttatcaaaaaaggggtacaaattcaatgaaaacaatgaataaagtggctatatatgtcagggtttcgacgacaaaccaggttgag

SEQ ID NO: 311 - DNA, 260 bp, Artificial Sequence
  Description of Artificial Sequence: Synthetic polynucleotide
taatacggctacttttctttttatctagcaactgtttccattttggaaacaactcaaaaaagccccacgctcagaagtttgcagaccgagagcgtgaggctagcaattacaagaaaaacttttcaaaagatattaccttttgagatgttttcttgtacccattttatcattttttaggaaattttgaaagaggtactactatgataacaacaaataaagtagctatatatgtcagggtatcgacgacaaaccaggttgag

SEQ ID NO: 312 - DNA, 260 bp, Artificial Sequence
  Description of Artificial Sequence: Synthetic polynucleotide
cttcaacaacacttatcgaaagaataaaaccaactgtttccaaaatggaaataactcaaaaaagccccacgctctcggtcggcaaacttctgagcgtgaggcatgtgacaggaaaagattttcatggagataacctctcatgatgtcttttcttgtacccattttatcattttttaggaaattttgaaagaggtactactatgataacaacaaataaagtagctatatatgtcagggtatcgacgacaaaccaggttgag

SEQ ID NO: 313 - DNA, 260 bp, Artificial Sequence
  Description of Artificial Sequence: Synthetic polynucleotide
taatacggctacttttctttttatctagcaactgtttccattttggaaacaactcaaaaaagccccacgctcagaagtttgcagaccgagagcgtgaggctagcaattacaagaaaaacttttcaaaagatattaccttttgagatgttttcttgtacccattttatcattttttaggaaattttgaaagaggtactactatgatagcaacaaataaagtagctatatatgtcagggtgtccactacctcacaagttgag

SEQ ID NO: 314 - DNA, 260 bp, Artificial Sequence
  Description of Artificial Sequence: Synthetic polynucleotide
caccatcctcgttcacgccactcttcgaggtgggggcgttcggtgcccaacgtggtgtcgtcgccgtgcccgggatagacgaccgtgcggtcgtcgaagcgatcaaacaccttcgtttcaaggtcgttcatcagcgagttgaactgatcagggtgtgttgtccggccaggaccgcccgggaataccgtaggctctcagctgtgaatacctcggggggcgatcgggtagcgctgtacgcacgcatttcgcaggacacaagc

SEQ ID NO: 315 - DNA, 260 bp, Artificial Sequence
  Description of Artificial Sequence: Synthetic polynucleotide
caccagccgcgttggcgccattcgtcgaggctcggacgctcggcacccagagtggtgtcgtcgccgtgcccgggatagacgaccgtgcggtcgtcgaagcgatcaaacaccttcgcttcaaggtcgttcatcagcgagttgaactgatcagggtgtgttgtccggccaggaccgcccgggaataccgtaggctctcagccgtgaatacctcggggggcgatcgggtagcgctgtacgcacgcatttcgcaggacacaagc

SEQ ID NO: 316 - DNA, 260 bp, Artificial Sequence
  Description of Artificial Sequence: Synthetic polynucleotide
cagaaaaagcaaataaaattagaagtacttttgaaggttatttttatagaattgttgaaagtaaatttgtaatggagagaaggaaagaatgtcgaggattattgttcgattggttaaatgaataatataaaattgcccacagggaaaaatatatatataatttaattatcatattcttagtaaataagtgggtgaaaattttgaaatacgctgtttatgtacgagtttcaacggatagagatgagcaagtttcatctgtt

SEQ ID NO: 317 - DNA, 260 bp, Artificial Sequence
  Description of Artificial Sequence: Synthetic polynucleotide
ggggtcttacacttcgacctacgaataccggacgacatcttagaaaggatggcggggtgagtgctccagggtggtatcccgaccctgctgggtcagggggtcagaggtattgggacggccaacggtgggcaccgcaggctgttcacgcccagcaagtggtgacaggaccgaaccacgtgctgcacctgatcctcaccatcctgacgttctggttcttcggtggttggatctgggtgtggctgatcgtggcgctgtccaac

SEQ ID NO: 318 - DNA, 60 bp, Artificial Sequence
  Description of Artificial Sequence: Synthetic oligonucleotide
aggcttataaacaaggttaaggtgacagctgaggacattgttatcaattggaaaatataa

SEQ ID NO: 319 - DNA, 60 bp, Artificial Sequence
  Description of Artificial Sequence: Synthetic oligonucleotide
gggcttataaacaaggttcaggtaacagctgaggacattgttatcaattggaaaatataa

SEQ ID NO: 320 - DNA, 260 bp, Artificial Sequence
  Description of Artificial Sequence: Synthetic polynucleotide
cagaaaaagcaaataaaattaaaaatacttttgaaggttatttttatagaattgttgaaagtaaatttgtagtcgagagaaggaaagaatgtcgaggattattgtttgattggttaaatgaataacataaaattgcccacagggaaaaatttatatataatttaattatcatattcttagtaaataagtgggtgaaaattttgaagtacgctgtttatgtacgagtttcaacggatagggatgagcaagtttcatctgtt

SEQ ID NO: 321 - DNA, 260 bp, Artificial Sequence
  Description of Artificial Sequence: Synthetic polynucleotide
ggggtcttacacttcgacctacgaataccggacgacatcttagaaaggatgagcgcgtgacagcgcctatcgccacgcctggttggtacccagacccttcgggctctggaggagaacggtactgggacggacaaacctggacggtgactcgaccggctccgcaaccgaagagaatcacggtcaactacgggttcgcgctgctcgcggtgttctcgctgctcggaacgttgtttttcggaataccgctggtaagcaacgga

SEQ ID NO: 322 - DNA, 260 bp, Artificial Sequence
  Description of Artificial Sequence: Synthetic polynucleotide
acacttaccgaaagagtaaaaacaactgtttctaaaatagatatagttgcaaacaaaaaaagccccacgctcagaagtttggcgaccgagagcatgaggctagtacttacaagaaaaacttttcaaaagatattaccttttgagatgttttcttgtacccattttatcattttttaggaaattttgaaagaggtactactatgataacaacaaataaagtagctatatatgtcagggtgtccactacctcacaagttgag

SEQ ID NO: 323 - DNA, 260 bp, Artificial Sequence
  Description of Artificial Sequence: Synthetic polynucleotide
gccaacgtggccttaattcttcaacaacacttatcgaaagaataaaaccaactgtttccaaaatggaaataattgcaaacaaaaaaagccccacgctctcaaaactttggcgagtctgagcgtgaggcaacagtatagtaaaaggcattaaatggcccgttttactatacccattttatcaaaaagggggtataaaagcaatgaaaacaacgaataaggtggcaatatatgtcagagtgtctaccacttcccaggtagag

SEQ ID NO: 324 - DNA, 260 bp, Artificial Sequence
  Description of Artificial Sequence: Synthetic polynucleotide
taatacggctacttttctttttatctagcaactgtttccattttggaaacaactcaaaaaagccccacgctcagaagtttgcagaccgagagcgtgaggctagcaattacaagaaaaacttttcaaaagatattaccttttgagatgttttcttgtacccattttatcattttttaggaaattttgaaagaggtactactatgatagcaacaaataaagtagctatatatgtcagggtttcgacgacaaaccaggttgag

SEQ ID NO: 325 - DNA, 260 bp, Artificial Sequence
  Description of Artificial Sequence: Synthetic polynucleotide
caccagccgcgttggcgccactcgtcgaggctcggacgttcagtgcccagagtggtgtcgtcgccgtgcccgggatagacgaccgtgcggtcgtcgaagcgatcaaacaccttcgcttcaaggtcgttcatcagcgagttgaactgatcagggtgtgttgtccggccaggaccgcccgggaataccgtaggctctcagccgtgaatacctccgggggcgatcgggtagcgctgtacgcacgcatttcgcaggacacaagc

SEQ ID NO: 326 - DNA, 60 bp, Artificial Sequence
  Description of Artificial Sequence: Synthetic oligonucleotide
ggcttaattaacaaggttcaggttacagctgacaaggttattattaagtggaaaatataa

SEQ ID NO: 327 - DNA, 60 bp, Artificial Sequence
  Description of Artificial Sequence: Synthetic oligonucleotide
gggcttataaacaaggtgcaggtaacagctgaggacattgttatcaagtggaaaatatag

SEQ ID NO: 328 - DNA, 260 bp, Artificial Sequence
  Description of Artificial Sequence: Synthetic polynucleotide
accaggccaaatagatggagaaaacggaaagtgtggattgagcgtgtggaattcttgtaattctacacattcttttttattacgtttggattaccggaagtatcaatacgacttgtgtaggctttcgtctattattcaatattccgcgctttgtttattattcctgctaaaagaaaaaggcggatcactccgccttcttttcttctttcattgttttcaaacggcgctttcccacatctcttctagcgcttcctcaacaa

SEQ ID NO: 329 - DNA, 260 bp, Artificial Sequence
  Description of Artificial Sequence: Synthetic polynucleotide
cggaaaaagcaaataaaattaaaaatacttttgaaggttatttttatagaattgttgaaagtaaatttgtagtcgagagaaggaaagaatgtcgaggattattgtttgattggttaaatgaataatataaaattgcccacagggaaaaatatatatataatttaattatcatattcttagtaaataagtgggtggaaattttgaagtacgctgtttatgtacgagtttcaacggatagagatgagcaagtttcatctgtt

SEQ ID NO: 330 - DNA, 260 bp, Artificial Sequence
  Description of Artificial Sequence: Synthetic polynucleotide
tgacggcaatgctctagctagccaaaaacttgacggaacaatgaaagtcaaggttaaataagacaataaaaaaagccctataatctccctcgccaaagtttgattatagagctagcaccacagaaagagaaatgtaaactggaaacagccttacatgttcttttctgtacccattttatcaaaaacgaggtacaaatacaatgacaatgcataaagttgctatctatgtccgagtatctaccacgtcgcaggctgacgag

SEQ ID NO: 331 - DNA, 260 bp, Artificial Sequence
  Description of Artificial Sequence: Synthetic polynucleotide
agcttaattaatagaatctatgtcaaagaaaatgaaattcagattgaatggaaaaactgataattttagttaatagcatttcaagcaatgtatctaaatatcttagtttaaataagaagaaatctctttaataacatcatcaaatatctcaatacttaccacctcatgaggctgtatcttctcgccatctaatacaaaatcaaatatctttccattctttctaacaacattcacggtgtcctcaaaccaccccttagctt

SEQ ID NO: 332 - DNA, 260 bp, Artificial Sequence
  Description of Artificial Sequence: Synthetic polynucleotide
agacattccaagaggagattcgatagcaacaaaagattatgtgaattcaaaaattaacgaagttagactttggcttattcttacaatgattggtataggtgtttcgttgattaaactttttatcatgtaatattataagcccatctaagggcttttcttataaacctaaaaccgaacatacattctgaaaggagaaaaaaatgaaagcagcactatatattcgtgtaagtacgcaagaacaggctatcgaagggtattct

SEQ ID NO: 333 - DNA, 60 bp, Artificial Sequence
  Description of Artificial Sequence: Synthetic oligonucleotide
aacctaatagataaagtgtttgttaaacctgggaatatcgagatcaagtggagaatttga

SEQ ID NO: 334 - DNA, 60 bp, Artificial Sequence
  Description of Artificial Sequence: Synthetic oligonucleotide
aacctgatagataaggtatttgttaaacctggcatcattgatataaattggaggatttaa

SEQ ID NO: 335 - DNA, 260 bp, Artificial Sequence
  Description of Artificial Sequence: Synthetic polynucleotide
cgctatgatcaaaccggaaagacagtaaccattgatagaatcaactttaaaaaagattagtacttctataacctacgaaccttcattagttatgtaagtactaattaataacaaacttcatgcctgccttagtgcaggcctcttttcatctaccacaacattcacatctcgatccactatgattagtatctttaccacataaaccgcagaaagcaatataccatcttctaaatttcattaataacaaaccccttccacat

SEQ ID NO: 336 - DNA, 260 bp, Artificial Sequence
  Description of Artificial Sequence: Synthetic polynucleotide
gtattcggaaggtacccccaattgcccgttgttgaaataaccaactataaacttaaataattttttattatatgggttacttatcgtatcaatggctcctcatgcatatgataagtaatctattatttaaaatgtttctgtttaatctctttatctattcttttatccacatattttaaaaactcccatatcaccctagtattgtatccttttctctttaactcatccaggtattccaataaaactagtttttctatcac

SEQ ID NO: 337 - DNA, 60 bp, Artificial Sequence
  Description of Artificial Sequence: Synthetic oligonucleotide
gcgcttattaacaaagttcaagtgactgctgacagtatcaaaattttatggaaaatttaa

SEQ ID NO: 338 - DNA, 60 bp, Artificial Sequence
  Description of Artificial Sequence: Synthetic oligonucleotide
agcttaattgacaaggtttttgtaacaaaagaggacatggaaattttatttaaaaaatag

SEQ ID NO: 339 - DNA, 60 bp, Artificial Sequence
  Description of Artificial Sequence: Synthetic oligonucleotide
atgatagttgatagggttgaattgacaaaagacaagtacattatccattacaatttttaa

SEQ ID NO: 340 - DNA, 260 bp, Artificial Sequence
  Description of Artificial Sequence: Synthetic polynucleotide
ggctcactgaagttcgacttccgggtccccgaggacatcgagaagagactctccgcgtgaacgcaaaaaagccccctcccaaggccgtagccctgagagggggtttctttgtctagccgactctcaccatcgagaaccaggagttggacgcattcgcgtcaccgaggatgttcacgtcaccgtcggtcttgagaccgggctgcaccgtcgcgccagcggagaggtagtactgcaccccgtcaccgccgtaggcgatgtcc

SEQ ID NO: 341 - DNA, 260 bp, Artificial Sequence
  Description of Artificial Sequence: Synthetic polynucleotide
gtcggcctggacgcctgggagttcacccccgtccacctggaccagatctgcgacttgatcttgtccgccggacggcgtacataatttgctagcactcgccaaatgtgagtgccagcacactttctacctgcggtttcatctgtccatataccgggtacaaagatagtcacgaattggctacactcaggggtatgggagagatggaagccaccaccaaagccgctgtgtatctgcggcagtccatcgacaggactggcgag

SEQ ID NO: 342 - DNA, 60 bp, Artificial Sequence
  Description of Artificial Sequence: Synthetic oligonucleotide
attgtggtatcaagggttgaagtaactaagaatggcattgatatttttttcaatttttaa

SEQ ID NO: 343 - DNA, 60 bp, Artificial Sequence
  Description of Artificial Sequence: Synthetic oligonucleotide
ctgcttgttcaacgtgttaaagttgatagagataatatagacattcattggactttttaa

SEQ ID NO: 344 - DNA, 260 bp, Artificial Sequence
  Description of Artificial Sequence: Synthetic polynucleotide
ctacatgacctcgaagctcgtcgacacggggcggggcgagcagtgggtgtacggatacatctgcgggaagccgagcatcgacaggcggacctccgcctgtgaagatcacctggaaccccggtattcgccgttccccaccctctcgcggcgtgtaccctgaagctgtaacagtcgaacgagcggtacagcttgggggtaccatgcatttcatgcaaaaccgcgggtcagggccggatgccgagtgcgacatctacgtccgc

SEQ ID NO: 345 - DNA, 260 bp, Artificial Sequence
  Description of Artificial Sequence: Synthetic polynucleotide
aacagcgggggagcgtgggagtttgagtttcgtatccccgatgcggtgaagtcgctctaaacgcaaaaagcccccctcgggaccgaagtcccaaggggggtttctcttactcctcttccgggtcgaccggggtttccggtacccagtcgcgcagagtccagtcgtccaccgtcccaccggagtgggtgttgaacacatccacctgactgcgctcgatacggacgccgccgtactggtactcgcggccgtgcttcaccgtc

SEQ ID NO: 346 - DNA, 260 bp, Artificial Sequence
  Description of Artificial Sequence: Synthetic polynucleotide
caccgagagatcggcctcttcggcgagccgttcctgcgtccatccctcgcggcgccgatggttgcggacgttctcctggagcgacatggaatcacctcgcaaccagcgtactgtgaacggcgaatcccgtgcggcgcttggcctggagcatgtaccctgaagctgtaacagccgaacgagcggtacaccttgggggtaccatgtccttcatgcaaaatcgcgggtcagggcaggtcgcagagtgcgacatctacgtccgc

SEQ ID NO: 347 - DNA, 260 bp, Artificial Sequence
  Description of Artificial Sequence: Synthetic polynucleotide
gggcgagagctcggcctcctcggcgagcctctcttgggtccaccccgcccggcgccgatggctgcggacgttctcttggagcgacatcgaatcacctcccaaccagcgtactctgatgggggaatcccgtgcgcggactgggatcgagcatgtaccctcaagctgtaacactcgaaccagcggtacagcttgggggtaccatgcgaggcatgaacaaccgtgggtcagggtctgaagcagaggccgatctctatctccgc

SEQ ID NO: 348 - DNA, 260 bp, Artificial Sequence
  Description of Artificial Sequence: Synthetic polynucleotide
catattgagtttgagaagaaagacaataaagccaggattttagacattcatttttattagggtttatataaagtataagcacgaaaactttacacaaatacgaaaaaatcttcaggcccactaatgttagacggcgctaaaaataaatggtttcacaaaaatgttcgttttcaaaaaaatcatttgaaacaaaccaaaaaaagccctcttactcggggcttgaatatagttaaaataaaaagccctgtcagggggctttt

SEQ ID NO: 349 - DNA, 260 bp, Artificial Sequence
  Description of Artificial Sequence: Synthetic polynucleotide
gatgaatataaacgtggtacaggtgcatctagaaaaataattattgtatctgctaaataactaaatgtcttttataggcagaggtacacctacacctataaaagacattcgttttaaacagcattacctatctgttttaacacatttagaattaatggtgatatttgaattaatacatatcccaatccagcattttgaattgtggaccatgctttttcactattccctaacatgaagaagaaacatccaccgacaattat

SEQ ID NO: 350 - DNA, 260 bp, Artificial Sequence
  Description of Artificial Sequence: Synthetic polynucleotide
gtcagcctcttcggcgagccgttcctgcgtccatcccttgcgtcgccgatggctgcggacgttctcttggagcgacatcgaatcacctcccaaccagcgtactgtgaacggggaatcccgtgcggcgcttggcctggagcgtgtaccctcaagctgtatcagtcgaacgagcggtacaccttgggggtaccatgcgaagcatgaatcatcgcgggtccgggccagatgccgagaccgacatctacgtgcgcatcagccag

SEQ ID NO: 351 - DNA, 260 bp, Artificial Sequence
  Description of Artificial Sequence: Synthetic polynucleotide
atcggcctcttcggcgagccgttcctgcgtccatccctcgcggcgccgatggtttcggacgttctcttggagcgacatggaatcacctcccaaccagcgtactgtgaacggggaatcccgtgtgtggactggcctcgggcatgtaccctcaagctgtaacagccgaacgagcggtacaccttgggggtaccatgtccttcatgcaaaatcgcgggtcagggcaagtcgccgagtgcgacatctacgtccgcatcagccag

SEQ ID NO: 352 - DNA, 260 bp, Artificial Sequence
  Description of Artificial Sequence: Synthetic polynucleotide
atcggcctcttcggcgagccgttcctgcgtccatccctcgcggcgccgatggttgcggacgttctcctggagcgacatggaatcacctcgcaaccagcgtactgtgaacggcgaatcccgtgcggcgcttggcctggagcatgtaccctgaagctgtaacagccgaacgagcggtacaccttgggggtaccatgccattcatgcaaaatcgcgggtcagggcaggtcgcagagtgcgacatctacgtccgcatcagccag

SEQ ID NO: 353 - DNA, 260 bp, Artificial Sequence
  Description of Artificial Sequence: Synthetic polynucleotide
atcggcctcttcggcgagccgttcctgggtccagccttcgcggcgccgatggtttcggacgttctcctggagcgacatggaatcacctcccaaccagcgtactgtgaacggcgaatcccgtgcggggcttgggctggggcgtgtaccctgaagctgtaacagccgaacgagcggtacaccttgggggtaccatgccattcatgcaaaatcgcgggtcagggcaggtcgccgagtgcgacatctacgtccgcatcagccag

SEQ ID NO: 354 - DNA, 60 bp, Artificial Sequence
  Description of Artificial Sequence: Synthetic oligonucleotide
tctgtgataaaagagatagttgtcacgaaagatgatatgacgataacgctagacttttaa

SEQ ID NO: 355 - DNA, 260 bp, Artificial Sequence
  Description of Artificial Sequence: Synthetic polynucleotide
ctacgtcgacgagagcggcaaggtccgccgctcgtaaccccctcctccctcaaggcccccgtgctcacctccgagcatgggggcctttttgcgccctcatcagggcaatcgggaatatccgcccgatataaccgccccctgcatggctagtaacgcccgggctattgtgctgacgatggtctgaccgttactatcagcctatgagcccagacaagcccctccgcgccgtcggctacgtccgcctctccaaggccaccgac

SEQ ID NO: 356 - DNA, 260 bp, Artificial Sequence
  Description of Artificial Sequence: Synthetic polynucleotide
tgggtaccgtgaagatggcggcggctcacctacagcgccgatcaggctgcaacagggactcgtctcggtggcacccgagaagccctgcgggtgggccgtcgtcctcctgaccaggcacttctctgtagacccattatgcgccatgcgcccacaagatgtagactcactctacgaagttgagcagctacggagggagcgcagtgggcaagcgggcggtcatctacacgcgagtgtcgcgagacgacacgggcgagggtcag

SEQ ID NO: 357 - DNA, 260 bp, Artificial Sequence
  Description of Artificial Sequence: Synthetic polynucleotide
tgctcctggctccagccggagcgcctacgatggcttcggacgttctcttgcagcgacgacatcgaatcacctcctggtcagggtatgccctccggggaaacgatgaagcccccgcgcgaagcgggggcgagggttcggagaatgttccccaaagcgataccacttgaagcagtggtactgcttgtgggtacactcctcgggtgatgaatcgaggggggcccaccatacgggccgacatctacgtccgaatcagcctggac

SEQ ID NO: 358 - DNA, 260 bp, Artificial Sequence
  Description of Artificial Sequence: Synthetic polynucleotide
aagcctatgcccggctatcaggcccgcgccgtcctcgcccgcaagcaggaggccgacgtcgacaacctctgggactaccgcctcgtcgaagtcccaacgaaccccgccaactaagcaaaagccccccggatctccgaggggcttttcttatgtcctctttgggcactcatgcgccctcatgagtgcctaaagggtatatggtgatccccatgaaaatcatcggctatgtgcgcctctcccgagcctcccgcgaggagtcg

SEQ ID NO: 359 - DNA, 260 bp, Artificial Sequence
  Description of Artificial Sequence: Synthetic polynucleotide
tgcgaggctggctccggctacaaggtccggatcacccgccagtggctcgacgagtacggcgcccccaagtgcccctgccacgacgaggtgatggtcgaggcgtaaggcgccaaacgtaaggccctcggagagatccgggggcctttcctatgtcctctttagacactcatgcgccctcgtgagtgcctaaaggggatatgatgggcgccatgagaatcctcggctacgtccgcctctccagagcctcccgcgaggagtcc

SEQ ID NO: 360 - DNA, 60 bp, Artificial Sequence
  Description of Artificial Sequence: Synthetic oligonucleotide
aagcttgttaaatacattgtcgtcgatgaagaaagaattgatatatttttgaatttttaa

SEQ ID NO: 361 - DNA, 60 bp, Artificial Sequence
  Description of Artificial Sequence: Synthetic oligonucleotide
aaggttgtcaaagagattctggtaaaaaccggcagcatagatttaatgctagatatatag

SEQ ID NO: 362 - DNA, 60 bp, Artificial Sequence
  Description of Artificial Sequence: Synthetic oligonucleotide
acattaattaaacgtgtagaagttaaacgtgatgaaatcaacgttatttttaaattgtaa

SEQ ID NO: 363 - DNA, 260 bp, Artificial Sequence
  Description of Artificial Sequence: Synthetic polynucleotide
cagcgtactgttggatcattacccgaaattgcattcactaggacgaaagttctatcttaatagttgatgggtaacaccaatatagggtgccctatcatgttgttacccatcacatataaacagcgctgttatgcggtttgtagaatcactctaaatcccggcgcgtaaaaactccacatgttacccctttttcctctgcatacttcattagttttctttgacgaaattctgagttagtataaaagatcaacatagtgtct

SEQ ID NO: 364 - DNA, 260 bp, Artificial Sequence
  Description of Artificial Sequence: Synthetic polynucleotide
cccttggagagacggccgattgggcatagggatcggtcgcggggcgccttactgatgtgaacgctaccacgggcgcctgtcgatcactcggcaggcgccttttgtcgtatacggtatattttcgcaggtcagagcgttggaatttacatgatcgattatgaacatagaaacacttccgtgttcgataaccctcatgtaatttgggtggcgtgcgcgccatcatttacaaccgtgtcagcagcgaccccactggtagaggc

SEQ ID NO: 365 - DNA, 60 bp, Artificial Sequence
  Description of Artificial Sequence: Synthetic oligonucleotide
caattgatagatagagtcgaggttactatggataacatcgatattatttttaagttttaa

SEQ ID NO: 366 - DNA, 260 bp, Artificial Sequence
  Description of Artificial Sequence: Synthetic polynucleotide
cttgctgactcatgccccgacgcttgcgtacgtcgcggagctgcttaccaatgtcggcactcatgagtcaagactacggcgcgtaagctggtgagcacatggaaaagcccccgcttcctggcgggggcgagggtccgaggcatgttccccaaagcgataccacttgaagcagtggtactgcttgtgggtacactctgcgggtgatgaatcgaggggggcccactgtacgggccgacatctacgtccgaatcagcctggac

SEQ ID NO: 367 - DNA, 260 bp, Artificial Sequence
  Description of Artificial Sequence: Synthetic polynucleotide
gagcagaagcgcgagctgacgctcggtgccctgcgccacgcgcggcggaagcggcgagagcagtccacgtaggtacgacagagccccctgctcctgacctggagagggggctctgttgcgctctgacctgcgggttcgtgctcaggagttgcctgctgggccattcagtacggacctactgattggtgtagcatgcacccatgacgatcagtggagggaccgacgaggccctgttctacttccgcatctcgctcgatgcg

SEQ ID NO: 368 - DNA, 260 bp, Artificial Sequence
  Description of Artificial Sequence: Synthetic polynucleotide
gggttaccgtcgagatggcggcggctcgtcgcagcgccgatcaggttgcaacagggacttgttctcggtggcacccgagaagccctgtaggcgggccgtcgtccgtctgaccaggcaacacgctgtagatccatcgtgcgccatgcgcccacaaggtgtagcctcactctacgaggtcgaccacctacggagggagagcagtgagcaagcgagcggtcatctacacccgagtgtcccgcgacgacacaggcgaggggcag

SEQ ID NO: 369 - DNA, 260 bp, Artificial Sequence
  Description of Artificial Sequence: Synthetic polynucleotide
gggttaccgtcgagatggcggcggctcgtcgcagcgccgatcaggttgcaacagggacttgttctcggtggcacccgagaagccctgtaggcgggccgtcgtccgtctgaccaggcaacacgctgtagacccatcgtgcgccatgcgcccacaaggtgtagcctcactctacgaggtcgaccacctacggagggagagcagtgagcaagcgagcggtcatctacacccgagtgtcccgcgatgacacgggcgagggacag

SEQ ID NO: 370 - DNA, 260 bp, Artificial Sequence
  Description of Artificial Sequence: Synthetic polynucleotide
gcggaggagtacaaggaccacccagactacgcgacccggtgggaggccccgtgagccccacgacgctgccagcccagcggcggggccgtcctgggtgcatccggctgtacctccgtctatcgcgcgccacggaggagtccacgtccatcgttcggcaggaatcggccggacgggatgaggcgggccgacggtggcccggcgtgcccatcgtcgtgtacgtggatgagggcgtgtccggtggcgcggagctggacaagcgg

SEQ ID NO: 371 - DNA, 260 bp, Artificial Sequence
  Description of Artificial Sequence: Synthetic polynucleotide
cagcggtgccgtcgtcgccgctgctgcagctggtggtgaggagagcgatcgcggctgccgtgcagagggccgggaggtagcgtgtcatgtttccgcagcgtattcgacgtgcgccttggggaccgggctacgcgcgtgatccgtggtggagcaagtgcgacacatctcccatttttgcggttacgccgctcattgtcggaatgggatcgtactgtcagttcatgcgagcgatcatctactgccgcgtctcatccgatccg

SEQ ID NO: 372 - DNA, 260 bp, Artificial Sequence
  Description of Artificial Sequence: Synthetic polynucleotide
cgcccagatcctggtcgacggggagcgcgtcgggcaggcgtcggtcctgaccccgggcatggagtacgcggaccgcctgaagatcaagggctggcactagccgccccgccctggaccccctggccgcccggctgggggtcctgttgcttcaactcccctttagctactcacgcgcccccgtgagtggctaatatgtacatatgcgagttatcggttacgtccggctatcccgggcatcacgagaagaatcgacgtcggtc

SEQ ID NO: 373 - DNA, 60 bp, Artificial Sequence
  Description of Artificial Sequence: Synthetic oligonucleotide
atgcttatatacaaagtagatgtcacgaaagaagacatcaatattatttttgatttttag

SEQ ID NO: 374 - DNA, 260 bp, Artificial Sequence
  Description of Artificial Sequence: Synthetic polynucleotide
tgtcatgggcctgagcctggacgacccgagcttgacgagctcgcagcgtgagcgccgacgcctggtccagaaggccatcgctcgacgccgcgtgatccactgatccgcctctgacctgcgacttctctgtgtacctgttgtgcgccatgcgcccacatgtggcacgatgggtacacaccccgtcactgagaggagccacgttgagcaagcgcgccgtcatctacacccgcgtgagtcgagacgacacaggagagggtcga

SEQ ID NO: 375 - DNA, 260 bp, Artificial Sequence
  Description of Artificial Sequence: Synthetic polynucleotide
ctaaagtagctaaagaaaatggctatacaggtattcctaacggtgatgttggaggagtccctactcccgacgaatattattctaatgatcaattagatccagatacaggattacctatggaagatgcagatccacatgatgttgaataatttttagggtagtctatctacccttattattttttacttttttaaggagtgatgtattatgaacgtagctatttacgttcgtgtcaggtgagttcctatgagcaagcaacg

SEQ ID NO: 376 - DNA, 260 bp, Artificial Sequence
  Description of Artificial Sequence: Synthetic polynucleotide
ggaacggctgattaggcttagggatcggccgcggggcgccttactggattaaggctaccacaggtgcccgtcgatgatccggcgggcacctttcgtcatatacggtgcattaacgcaggtcaggcagcacgattgcacatgtggggtaagcgacatggaaacatttctgtgttccataaccgtcatgtagtttgggtttcgtgcgcgcgatcatctacaaccgtgtcagcagcgatcccactggtagggggcgttccgtc

SEQ ID NO: 377 - DNA, 260 bp, Artificial Sequence
  Description of Artificial Sequence: Synthetic polynucleotide
agacggccgattgggcatagggatcggtcgcggggcgccttactgatgtgaacgctaccacgggcgcctgtcgatcactcggcaggcgccttttgttgtatacggtatattttcgcaggtcagagcgttggaatttacatgatcggttatgaacatagaaacacttccgtgttcgataaccctcatgtaatttgggtggcgtgcgcgccatcatttacaaccgtgtcagcagcgaccccactggtagaggccgttccgtc

SEQ ID NO: 378 - DNA, 260 bp, Artificial Sequence
  Description of Artificial Sequence: Synthetic polynucleotide
agacggccgattgggcatagggatcggtcgcggggcgccttactgatgtgaacgctaccacgggcgcctgtcgatcactcggcaggcgcctttcgtcgtatacggtatattttcgcaggtcagagccttgggatttacatgatcggttatgaacatagaaacatttccgtgttcgataaccctcatgtaatttgggtggcgtgcgcgccatcatttacaaccgtgtcagcagcgaccccactggtagaggccgttctgtc

SEQ ID NO: 379 - DNA, 260 bp, Artificial Sequence
  Description of Artificial Sequence: Synthetic polynucleotide
agacggccgattgggcatagggatcggtcgcggggcgccttactgatgtgaacgctaccacgggcgcctgtcgatcactcggcaggcgccttttgtcctatgcggtatattttcgcaggtcagagccttgggatttacatgatcggttatgaacatagaaacacttccgtgttcgataaccctcatgtaatttgggtggcgtgcgcgccatcatttacaaccgtgtcagcagcgaccccactggtagaggccgttctgtc

SEQ ID NO: 380 - DNA, 260 bp, Artificial Sequence
  Description of Artificial Sequence: Synthetic polynucleotide
agacggccgattgggcatagggatcggtcgcggggcgccttactgatgtgaacgctaccacgggcgcctgtcgatcactcggcaggcgccttttgtcgtatacggtatattttcgcaggtcagagccttggaatttacatgatcggttatgaacatagaaacacttccgtgttcgataaccctcatgtaatttgggtggcgtgcgcgccatcatttacaaccgtgtcagcagcgaccccactggtagaggccgttctgtc

SEQ ID NO: 381 - DNA, 260 bp, Artificial Sequence
  Description of Artificial Sequence: Synthetic polynucleotide
tgcgcggccggcgcgccggccagctgcgcggcggtggtgatcccgccggccgaaagtttcagcatgcgcgcaggttaacctaccagtgtggtcctgccgccggttgcggtcgagacgctgtgagcagtctgaatgtacatgacgaccaaacaccgaagaaacatttccgtgttcgataaccctcatgtaatttgggtggcgtgcgcgccatcatttacaaccgtgtcagcagcgaccccactggtagaggccgttctgtc

SEQ ID NO: 382 - DNA, 260 bp, Artificial Sequence
  Description of Artificial Sequence: Synthetic polynucleotide
gggacggctgattaggcttagggatcggccgcggggcgccttacggttgtgaaggctaccacaggtgcccgtcgatgattcggcgggcacctttttcgtatacggtgcattaacgcaggtcagacggcacgatcgtacatgtggggtaagcggcatggaaacatttccgtgtttgataacggtcatgtagtttggggtgtgtgcgcgcgatcatctacaaccgtgtcagcagtgatccgactggtagggggcgttccgtc

SEQ ID NO: 383 - DNA, 260 bp, Artificial Sequence
  Description of Artificial Sequence: Synthetic polynucleotide
tcgtcgccagcgcagctggtggtgaagagcgcgagcgcagctgccgtgcagaggacggggaggtaacgtgtcatgtttccgcagcgtattcgacgtgcgcctcgcggacagggctacgcgcgtgatccgcggatgtagaaagtgcgacacatctcccattcttgcggttaaaccgctaattgtcggaatgggactgtactgtgcggcgcatgcgagcgatcatctactgccgcgtctcatccgatccgcacgcccgcggc

SEQ ID NO: 384 - DNA, 260 bp, Artificial Sequence
  Description of Artificial Sequence: Synthetic polynucleotide
gcattaataaataaagtagagctaacgaacgaagatatgaaaatagagtggaacatatagccccactctacctattcacctattcaattaaagttagtgcacaaacaacttctacatgcctagtttttcattgttcaacagtattctctaatagaaagaacctgttattttattttaacatagattacaaagaagccccttatctatatagaagctggggctttttgtaatttgattgtatttttctaaaaatgaaacta

SEQ ID NO: 385 - DNA, 233 bp, Artificial Sequence
  Description of Artificial Sequence: Synthetic polynucleotide
agcatccagttcgagaaacaggacgggactgttcaaatattggacgtaaacttttattgagtacctttacgaaggcttaggtgtagatctcggtggtcgccgtatcattaaaaaaaaaaaaaaagaagacaaagtgcgggtccgaacacacaaaaaattacaaaaagtacacaaacgtgagtactaataacacaacagacacatgagacctaagaacagtcaagaaaaggacg

SEQ ID NO: 386 - DNA, 260 bp, Artificial Sequence
  Description of Artificial Sequence: Synthetic polynucleotide
tatgtcgaagtcagccccgggcggccccgagcgaaagtcgtcgtccggccccgatggtgagactcggcactagtcactagcatgactgtgctctagtctcaccatcggctgatagaccagaatcacgcggcgccagcgaggaaagcagccaccgtgtggttcgcatgccggtcgtggttatgcctggcacggtcgtatcgtgcggtgatcctcgggtccgagtggcgggcagccacctggacgtcgcgcagcggaacgcc

SEQ ID NO: 387 - DNA, 260 bp, Artificial Sequence
  Description of Artificial Sequence: Synthetic polynucleotide
cagaagttggcaaggggtttggggatgttcgttatcaatccgttatcgggttggtcgtgccagccccttgatcaacaggcctttgggcaggtcaggccgtacttccggcgtcgggaggccttgtgtccatttcgggcagattctggggaaagtgaccgtgaatctcggtaccaacttctggcgctcgtacgctggtcggcatgagtagccgttatgagggccgccgggcggtcatctacacccgagtgtcgaaggaccgc

SEQ ID NO: 388 - DNA, 260 bp, Artificial Sequence
  Description of Artificial Sequence: Synthetic polynucleotide
gagtttgttgaacgtatagaactatttgatgatgaggtaattattaaatataaattttaggtacatagtgttatttacactaataaacaaaatcatatacctaaaatattacatttatacaaacctatagacaatacgaacatgcattcggtataattgtattactaggaggccgatattatgaaaactaattatgtaggagtagttgaaaagattagaatgttaagtatgtacccaaaaatgctagttcgattctcatt

SEQ ID NO: 389 - DNA, 260 bp, Artificial Sequence
  Description of Artificial Sequence: Synthetic polynucleotide
gtaatatacagagaaaaagggaagttcaagaagattacactggactatactttaaaatgaccccaacctgtgcaagagttaacttcgcgcatgcaaacttaacttttatacaggttagggacgatgtattatttccaacgataataatctaaacaaattaaaacatcaaggcggatcactccgccttcttttcttcttttctacgcttcccacatttcttcgagtgcctcctcaacaaacagatatggataaaaaaagag

SEQ ID NO: 390 - DNA, 82 bp, Artificial Sequence
  Description of Artificial Sequence: Synthetic oligonucleotide
ttaaataaagaaggtaatattaatacagttaaaatcaatgaaatacatttcaaatattaatgagtgttatgtaactagaaag

SEQ ID NO: 391 - DNA, 260 bp, Artificial Sequence
  Description of Artificial Sequence: Synthetic polynucleotide
gctgcagctcgtggtgaggagcgcgagcgcagctgccgtgcagagggctgggaggtagcgtgtcatatttccgcagcgtattcgacgtgcgcctcgcggacaccgctacgcgcgcgatccgcggcgaagctaatgcgacacatctcccattctcgccgttacaccgctcattgtcggaatgggactgtactgtgcggcgcatgcgagcgatcatctactgccgcgtctcatccgatccgcacgcccgcggcaagtccgtc

SEQ ID NO: 392 - DNA, 260 bp, Artificial Sequence
  Description of Artificial Sequence: Synthetic polynucleotide
cgctgccgcacccggcaacgaggacgatcgcggctgccgtgcagagggctgggaggtagcgtgtcatgtttccgcagcgtattcgacgtgcgcctcggagacagggctacgcgcgtgatccgtggtggagccagtgcgacacatatcccattcttgcggttacgccgctcattgtcggaatgggatcgtactgtcagtgcatgcgagcgatcatctactgccgcgtctcatccgatccgcacgcccgcggcaagtccgtc

SEQ ID NO: 393 - DNA, 260 bp, Artificial Sequence
  Description of Artificial Sequence: Synthetic polynucleotide
agcagcggccccgatgacggccgcgacgagtttctgtttcacggcgctgagagtaccgggcggcggcccgcacgaggtgctaatcggctggtcggggcgtgaaacggtgccgcggtaacctatgccacaaagtgatgcaaggctgggcatgggtcaattaatggcctaagttggagggcgtgaaaaaatcgccccgtgtcgtggtctacctgcggcaatccgaagatcgggccgacgacggcctcggcgtcgatcgccag

SEQ ID NO: 394 - DNA, 260 bp, Artificial Sequence
  Description of Artificial Sequence: Synthetic polynucleotide
gctgcagctcgtggtgaggagcgtgagcgcagcggccgtgcagaggacggggaggtagcgtgtcatgtttccgcagcgtattcgacgtgcgcctcgcggacagagctacgcgcgcgatccgcggcgaagctagtgcaatacatctcccattctcgccgttacaccgctcattgtcggaatgggactgtactgtgcggcgcatgcgagcgatcatctactgccgcgtctcatccgatccgcacgcccgcggcaagtccgtg

SEQ ID NO: 395 - DNA, 260 bp, Artificial Sequence
  Description of Artificial Sequence: Synthetic polynucleotide
tgctgcagctggtggtgaggagcgcgagcgcagctgccgtgcagagggctgggaggtagcgtgtcatgtttgcgcagcgtattcgacgtacgcctcccggacagggctacgagcctgattcgcggtgaagcagttcgacacatctcccattcttgcggttaaaccgctcattgtcggaatgggactgtactgtgcggcgcatgcgagcgatcatctactgccgcgtctcatctgatccgcacgcgcgcggcaagtccgtc

SEQ ID NO: 396 - DNA, 260 bp, Artificial Sequence
  Description of Artificial Sequence: Synthetic polynucleotide
tattccgaccagattcatatgacaatcgtttctttgattacacagttccttatgaagatgctacgaatataaaaatacacggtaaagtagtaatgtacgtagctacattaaactaatacctagatcaattaaatctttagcgctaggaatttaatggacagcccgtacagctgtcctctttttaaaaggagagataaatagtgactgttggaatttatataagagtaagcactgaggaacaagtgcgagatggtttctct

SEQ ID NO: 397 - DNA, 260 bp, Artificial Sequence
  Description of Artificial Sequence: Synthetic polynucleotide
aatatacaactcaaaaaaataaatgaaaaaaatattgttgtaaacataacattttattagtatttatgttatgtttacacatataaagttctcatatatacaaaaaacaacaaaacaaaagagcacagcgtgtataagtagtgttggtagcactcttataccgtccacctgattgagccaggtaaacacttgctatactctcatgagtcattgtacatcatgcagggtctattaagcaacgtttacttaattggtgacgt

SEQ ID NO: 398 - DNA, 260 bp, Artificial Sequence
  Description of Artificial Sequence: Synthetic polynucleotide
ctgcagctggtggcgaggagcgcgagcacggcggccgtgcagaggactgggcggtagcgtgtcatgtttccgcagcgtattcgacgtgcgcgttccggacagggctacgcgcctgatccgcggtgaagcaaagtgcgacacatctcccattcttgcggttaaaccgctcattgtcggaatgggactgtactgtccggcgcatgcgagcgatcatctactgccgcgtctcatctgatccgcacgcccgcggcaagtccgtc

SEQ ID NO: 399 - DNA, 260 bp, Artificial Sequence
  Description of Artificial Sequence: Synthetic polynucleotide
atctacgtcgacgtcacctggcccaacggcttcaccatttccgggctcggaaccggcgagggcgacgcgttgaagttcatcgagctggtgaaccggctcgcccagcgctgacgtggtctcctgacgtgcgggctgagacgcatctcccattcttgctgttaaaccgctaactgtcggaatgggactgtactgtccggcgcatgcgagcgatcatctactgccgcgtctcatccgacccgcacgcgcgcggtaagtccgtc

SEQ ID NO: 400 - DNA, 260 bp, Artificial Sequence
  Description of Artificial Sequence: Synthetic polynucleotide
gctgcagctcgtggtgaggagcgtgagcgcagcggccgtgcagaggacggggaggtagcgtgtcatgtttccgcagcgtattcgacgtgcgcctcgcggacagcgctacgcgcgcgatccgcggcgaagctagtgcaatacatctcccattcgcgccgttacaccgctcattgtcggaatgggactgtactgtgcggcgcatgcgagcgatcatctactgccgcgtctcatccgatccgcacgcccgcggcaagtccgtg

SEQ ID NO: 401 - DNA, 260 bp, Artificial Sequence
  Description of Artificial Sequence: Synthetic polynucleotide
gaacatctacgtcgacgtcacttggcccaacggcttcaccatttccgggctcgggaccggcgagggcgacgcgttgaagttcgtcgagctcgtgaacaggctcgcccagctctgataagcgctcggcggcggctgcgacacatctcccattcttgcggtttatccgctaattgtctgaatgggactgtactgtccggcgcatgcgagcgatcatctactgccgcgtctcatccgatccccacgcccgcggcaaatccgtc

SEQ ID NO: 402 - DNA, 260 bp, Artificial Sequence
  Description of Artificial Sequence: Synthetic polynucleotide
taaatttacggggttattaaagtgtcagcattgtggttcgactttaaagagacaagtttcttacaagaaaaaaattgtttggtgctgttccaaatacataaaagaaggcaaagtaacttgtcaggggatgcgagtgccagaagtagatatttcaaattgggagataacctcacctgttacagtaatagaaagggatagaaatggggaaaagtattacagttataccggccaagaaagtgcagaccagtgttcttcatcag

SEQ ID NO: 403 - DNA, 260 bp, Artificial Sequence
  Description of Artificial Sequence: Synthetic polynucleotide
taaatttacggggttattaaagtgtcagcattgtggttcgactttaaagcgacaagtttcttacaagaaaaaaattgtttggtgctgttccaaatacattaaagagggaaaagcagcttgtcaagggatgcgtgtgccagaagtagatatctcaaattggacagtaacctcgccagtaaaagtgatagaaagggatagagatggggaaaagtattacagttattccggccaagaaagtgcagaacatcgttcaacatcag

SEQ ID NO: 404 - DNA, 260 bp, Artificial Sequence
  Description of Artificial Sequence: Synthetic polynucleotide
tggcgtgatgggtgagacgtcgcagaacatctacgtcgacatcacttggccgaacggttacaccatgtccgggctggggaccggcgaaggcgacgccctgaagttcgtcgagctggtcaaccggctcgccgctcgcgacacataaaccttttcgacagtaataccgccaattgtcggatagggatagtacggttcgccccatgcgggcgatcatctactgccgagtctcgtcagatcccaacgcgcggggaaagtctgtg

SEQ ID NO: 405 - DNA, 260 bp, Artificial Sequence
  Description of Artificial Sequence: Synthetic polynucleotide
tcgaacaggtcgaccgagaagtcgtcgccgccgtcgctgcccgcccagtagagcgcgattcggtaggcggacggcattcgtcgtcccggccgaagtggaagcacgtccacgaattccctccttcgatctgaccagagatatatatcccttttcgacggtatgacctaaaactgtcagatagcgattgtagggtttagcacatgcgagcgatcatctactgccgcgtttcgtccgatccgaagatgcgcgaacgaagcgtg

SEQ ID NO: 406 - DNA, 260 bp, Artificial Sequence
  Description of Artificial Sequence: Synthetic polynucleotide
taaatttacggggttattaaagtgtcagcattgtggttcgactctaaagagacaagtttcttacaagaaaaaaattgtttggtgctgttccaaatacattaaggaaggaaaagcagcttgtcaagggatgcgtgtgccagaagtagatatctcaaattggacagtaacctcgccagtaaaagtgatagaaagggatagagatggggaaaagtattacagttattccggccaagaaagtgcagaccagcgttcaacatcag

SEQ ID NO: 407 - DNA, 260 bp, Artificial Sequence
  Description of Artificial Sequence: Synthetic polynucleotide
aaaggaattaaagggaagcgccagaactcattgaagattacgggtatagagttttattaattggaagttcggaataactatgcagatacctgatacacacttccaacaaaaataaccacactcctaaattaataggtggtgtggttttgttgattgtaggggtataaaaataaccgcattattaaagatacggttactctgttatctgtaaatataatagtagtttaaaaattagtcgttattgttagttctttttttat

SEQ ID NO: 408 - DNA, 260 bp, Artificial Sequence
  Description of Artificial Sequence: Synthetic polynucleotide
aaaggaattaaagggaagcgccagaactcattgaagattacgggtatagagttttattaattggaagttcggaataactatgcagatacctgatacacacttccaacaaaaacaaccacactcctaaattaataggtggtgtggttttgttgtattaaaaaaccgaatttaatatatctatgttttatttaacatgaatcgccttgttatttaaaaaatacacctattataataccgataatacttacaacagtaggtgc

SEQ ID NO: 409 - DNA, 260 bp, Artificial Sequence
  Description of Artificial Sequence: Synthetic polynucleotide
agaggaattaaagggaagcgccagaactcattgaggattacaggtatagagttttattaattggaagttcggaataactatcctgatacctgatacacacttccaataaaaattaaccacactcctaaattaataggtggtgtggttttgttggttgtgtggggataaaaataaccgcatcagttaagatgcggttatctagcaagggccacgtatttataaatacgtttagaatctcttcggcaactttgctatagaca

SEQ ID NO: 410 - DNA, 89 bp, Artificial Sequence
  Description of Artificial Sequence: Synthetic oligonucleotide
aagaacgacaataaaaagaaacgacgttcccttaaaataaaggatatcgagttctattaatattttatggaagtatgcacaattaatca

SEQ ID NO: 411 - DNA, 89 bp, Artificial Sequence
  Description of Artificial Sequence: Synthetic oligonucleotide
aagaatgataacaaaaagaaacgtcgttcccttaaaataaaggatatcgagttctactgatattttatggaagtatgcacaattaatca

SEQ ID NO: 412 - DNA, 260 bp, Artificial Sequence
  Description of Artificial Sequence: Synthetic polynucleotide
accattacagtagagatacaagggaacgacgttgttatcactgatcacaccctcctttaagtgttttgcctaaaggagcatttacacttgaaagtgctatgttaggcaaaaaaagagcgccctataatggacgctctcgcttatttgaatgatccccaataatctacacgttttccgtttgcactctcaccagttgccatataaccatatgttccgtttgctcgtggttgtctgatccaaacatgaccgtctaactcaat

SEQ ID NO: 413 - DNA, 260 bp, Artificial Sequence
  Description of Artificial Sequence: Synthetic polynucleotide
ataaatgtggtaaagtctgggaacaaaaaatttaaaaagaaaaccgcccggtgcttccaacaccgaacggcttcatataaaattataccgacatgtgccgatacatacttcttacaaaatcattgtatcatcctggcactaaactgtaaactggtatagtgttatttttatactcatttttagaaagaaggtttaatacaatgaaaaaagtcaagcgcacagccctttatattagagtctctactactgagcaggcccaa

SEQ ID NO: 414 - DNA, 260 bp, Artificial Sequence
  Description of Artificial Sequence: Synthetic polynucleotide
ttgatcggcgagttcgcgcccaggagcatcggcgccgagctgctggaggtcgaggcatgaaggacgggacgctcgagaccttcgtgccgctgaccctgcggcggcgcggcgtgcgccggctggttcagcaccaggccgaggaccgggacgcgcacgacagcacgctcatcgaagggatggcgcgggccttccactggcaacggctgctggacagcggcgcgatgcccagcggctcggccatcgcgcgtgccgaagggctg

SEQ ID NO: 415 - DNA, 68 bp, Artificial Sequence
  Description of Artificial Sequence: Synthetic oligonucleotide
cacgttaaaagagggaaaactaagcattctatcaaaataaaaaacattgatttttattaacttctttt

SEQ ID NO: 416 - DNA, 260 bp, Artificial Sequence
  Description of Artificial Sequence: Synthetic polynucleotide
gattatgtaaaacttaaaaacaggcattctatcaaaataaatgatatagaattttattaacttatgtacggaagtatagacactcgattaatatttaatgtgtatacttccgtaaaaataaccacgctcataaagaacgtggtagcaaaatttataaaggagtaaaaaaagattaaattgtatgtaatttaattgtagcacagaccgtgtaaccaatgtagtgttaaactatgttttttaatatcaatctaacatctaca

SEQ ID NO: 417 - DNA, 260 bp, Artificial Sequence
  Description of Artificial Sequence: Synthetic polynucleotide
gagtatgtaaagcttaaaaacaggcattctattaaaataaacgatatagaattttattaacgtatgtacggaagtatagacactcgattaatatttaatgtgtatacttccgtattttttatagaacccgtctgattctacgggtttagattatccgtgtcgaaatcgaggcgtttaaaataaaaaaccaccacactcaaaagaatgtggtagcaaaaattataaaggagtaaaaaagattaaattgtatgtaatttaat

SEQ ID NO: 418 - DNA, 260 bp, Artificial Sequence
  Description of Artificial Sequence: Synthetic polynucleotide
gattatgtaaaacttaaaaacaggcattctatcaaaataaatgatatagaattttattaacttatgtacggaagtatagacactcgattaatatttaatgtgtatacttccgtaaaaataaccacgctcataaagaacgtggtagcaaaatttataaaggagtaaaaaaaagattaaattgtatgtaatttaattgtagcacagaccgtgtaaccaatgtagtgttaaactatgttttttaatatcaatctaacatctac

SEQ ID NO: 419 - DNA, 260 bp, Artificial Sequence
  Description of Artificial Sequence: Synthetic polynucleotide
aggaacaaatagaatgggcagaagaaaatggtaagttagaagacaactaataaaattgtctactaacgatttaaatgacgaagcattgatagtgtataaattacttcttattaattaataatatctaggttggttatagtttaatattttttggggtagcacgactacccttattatttttttaccttttttagggagtgatgaattatgaacgtagctatttacgttcgtgtcaggtcagtacattagaacaaaaagaa

SEQ ID NO: 420 - DNA, 260 bp, Artificial Sequence
  Description of Artificial Sequence: Synthetic polynucleotide
gattatgtaaaacttaaaaacaggcattctatcaaaataaatgatatagaattttattaacttatgtacggaagtatagacactcgattaatatttaatgtgtatacttccgtaaaaataaccacgctcataaagaacgtggtagcaaaatttataaaggagtaaaaaagattaaattgtatgtaatttaattgtagcacagaccgtgtaaccaatgtagtgttaaactatgtttttttaatatcaatctaacatctaca

SEQ ID NO: 421 - DNA, 260 bp, Artificial Sequence
  Description of Artificial Sequence: Synthetic polynucleotide
ttcaggaacaaatagaatgggcagaagaaaatggtaagttagaagacaactaataagatcgtctactaacgatttaaatgacgaaacattgatagtgtataaattacttcttattaattaataatatctaggatggttataatttaatatttttagggtagcatgcctacccttattatttttttactttttagggagtgatgaattatgaacgtagctatttacgttcgtgtcaggtcagtacattagaacaaaaagaa

SEQ ID NO: 422 - DNA, 260 bp, Artificial Sequence
  Description of Artificial Sequence: Synthetic polynucleotide
tagacgaccgtgcggtcgtcgaagcgatcaaacaccttcgtttcaaggtcgttcatcagcgagttgaactgatcagggtgtgttgtccggccaggaccgcccgggaataccgtaggctctcagctgtgaatacctcggggggcgatcgggtagcgctgtacgcacgcatttcgcaggacacaagcggtaaagctgtcggggtggccgaccagttggaaacggcacgcaagttctccgcagaccgcggctacgacgtcgtc

SEQ ID NO: 423 - DNA, 60 bp, Artificial Sequence
  Description of Artificial Sequence: Synthetic oligonucleotide
ataaaaaatattgtggtttatccagatggaaatttgaaaataaattttttaggatattaa

SEQ ID NO: 424 - DNA, 260 bp, Artificial Sequence
  Description of Artificial Sequence: Synthetic polynucleotide
tttatcgttagtaaaggttaagttaacctttaaaattgttagtgggtagtatccactttttttagttttatggttttaatctccttaaggagattaaaactaaaattttgactattttcaaaatatttttatatttttactgtaaatatagatttttaaaaattgattttaatttttattattttacattaaataaagatatgtctggaagtcacaatattaaattgacgttagaacaacgtcaaaaactagtccgaatg

SEQ ID NO: 425 - DNA, 260 bp, Artificial Sequence
  Description of Artificial Sequence: Synthetic polynucleotide
agaggtgtattcgataccattacagtagagaatacaagggaacgacgtttgtatcactgatcacaccctcctttaagtgttttgcctaaaggagcatttacacttgaagttgcctcatctagcataagaatttgcggatttcgaagtaacgctcgggcaatggcaattcgctgtctttgtccaccagaaagcttcacaccgcgttctccaacttctgttgcataaccgtttggtaagtcatgaataaatgcatcaacata

SEQ ID NO: 426 - DNA, 260 bp, Artificial Sequence
  Description of Artificial Sequence: Synthetic polynucleotide
atacaagaaattcacattgatcatgacgtggttgatataatttggagatggcgtttttgacgttatctttttatgtattcatttccggctattcaagtagctagtcttgaataccgaaaaaattcgagacaaaacaaaagagcacagcctgtatataaagtgcgaccaacactctatataccgtccacctgattacgccaggtaaacacttgctatactctcatgaattattttacatcatgtagggtttattcagcaac

SEQ ID NO: 427 - DNA, 260 bp, Artificial Sequence
  Description of Artificial Sequence: Synthetic polynucleotide
tctataatagattatatagaaatagataataacaaaaacatcactattaattttatataattatttggactaacatatagtatccacttggctattattagttagtccaaataaataaaatacttataacaattgaaatacgcgatatacactgaacctcccatgactaaagtcacagggttcctgtttcatagaatttcgcataatcaaatgttagttcacaatactattctaacttaccttgacctttaaatactctg

SEQ ID NO: 428 - DNA, 260 bp, Artificial Sequence
  Description of Artificial Sequence: Synthetic polynucleotide
aaatcactaataaacaaaatttatattgatggtgaacaagttactattgaatggctctagtagcttgtttatttagattgtttagttcctcgttttctctcgttggaagaagaagaaacgagaaactaaaattataaataaaaagtaacctatttttctgtagattgctttttatcatttatatagaagaaagccgctttttattagattataattgatgttttttgatttatatttcacttcttgtgcaaataacgata

SEQ ID NO: 429 - DNA, 260 bp, Artificial Sequence
  Description of Artificial Sequence: Synthetic polynucleotide
aaatcactaattaataaaatttatatcgacggtgaacaagttactattgaatggctctagtagcttgtttatttagtttatttagtacctcgttttctctcgttggaagaagaagaaacgagatacaaaaaaagaacatcctctcaaaaggatgtctttattttacttttatatagaagaaacagtatttctgtgactaattattaacaatagattgatgttgtaaatactcgtcatagatagtctttaaatctatttca

SEQ ID NO: 430 - DNA, 219 bp, Artificial Sequence
  Description of Artificial Sequence: Synthetic polynucleotide
aacttcatagaaaagatttacattaatcaaaataacgtcaaaattatttggcgtttttaagtaattattttatgtattcatttccggctattcatacagcccaaataaaaaatgattctttttgcttaatagcctctataactccttgcgccgccaaattctggccagtagacaacgtcccgttccactgtaacaaatttgaattcttttctctctttc

SEQ ID NO: 431 - DNA, 260 bp, Artificial Sequence
  Description of Artificial Sequence: Synthetic polynucleotide
ccaaaaaggccgacgcctttaaaaagacggcgaccgatgctgcacagattgatcagctagactatgagcatcaaaccgctatcgtgaggatgctcatcgatcacatcaacgtaagtaatactggtttagatatttactggcaaatctaatggtcgctttaaaaggcggcttttttcttgcccaaaataaaaagatttagagagtgccatttcaaccacaatctctaaatcttttctaatcttacagatcgtccagtaaga

SEQ ID NO: 432 - DNA, 260 bp, Artificial Sequence
  Description of Artificial Sequence: Synthetic polynucleotide
tttaaaggtatacactaatccatcgcaaccattaatttttgaaagtaacattggaactaaagataaggataaaataaccatttggattaaatctttaaagcaaatggaagaagactacgaggaacaagaacaagaataaattaaattttatagtggtcaattttttaacaattttttttgttaaaaaatacattaaataaatggaaacaaaaccaagacttacagttgaacaacgtacgaatgttgttaaaaaataccaa

SEQ ID NO: 433 - DNA, 260 bp, Artificial Sequence
  Description of Artificial Sequence: Synthetic polynucleotide
gggtgtcacccacgtatccaagaagtggtggtattgtacctaaagccgcgctaattttatttttaagactatccaaggtatcacccgaggataatgttacatctcttccgttaatcgtaaacatttattaaatatctaataaagggaacctttcgatttgtttccagttgtaaaaaaatttattttttagtagtaaataaatggaaattacaactggaaataaatcgagactaactaaagaagagcgtcaagcagttttt

SEQ ID NO: 434 - DNA, 260 bp, Artificial Sequence
  Description of Artificial Sequence: Synthetic polynucleotide
aacagtatcctctagctttacaacaattagtatttttaggaacaactattttaggtatagtaaataattttcaatccattttttgatgaattgaaattatggttttttaatccattaaatggattaaaaaataacttgagttagaatgatttgaaattgaatttacaagtaaaatttttttattatttccaagtcaataaatggaaactgttaaaccaagattaactttatgtgaccgaacagaagttattaaattatat

SEQ ID NO: 435 - DNA, 260 bp, Artificial Sequence
  Description of Artificial Sequence: Synthetic polynucleotide
caaagtttagggataaatataatcacaaaatttgatttaataaaaactttggccgaaattgatactaaaaaaatagaaatagattatagtgattacagcgaaagcgaataatttttagctttttttaatgtttatttaaacattaaaaaaaattaatacgtattaattttttttaattaaaataatttacagtataataaatgatacgcccacgtttaactaaagaacaacgcaatgaaattgttaatttatacacaagt

SEQ ID NO: 436 - DNA, 260 bp, Artificial Sequence
  Description of Artificial Sequence: Synthetic polynucleotide
aagggcaccgctcgcaccgtgaccttcgctctcgacggccacacctacgagatcgagctgaacgagcgcaacgaggcccggctgcacaaggcgctggcccccttcgtgaaggcgggccggaaggccaagccgacgcgccgacgtagagcgaagtaggacaacgcgcccacgttgttcgatcttggtctacactccccggcatgaagcgagcagtgatctacacccgcgtgagccgggacgacacaggtgagggccagtcc

SEQ ID NO: 437 - DNA, 260 bp, Artificial Sequence
  Description of Artificial Sequence: Synthetic polynucleotide
taaaccataattctcaccttattaatcagaaagaagaaaaagaggaagagttagaaacgtgtactttttgtgagggataaaaatttaatttttaaagtctaattttaatcactaattgtgattaaaattaaaaattgtgaataaatatgtataaaaatttttttaatattttagtttattttttaaagtaaataaaagtaatgcaaggaagttataaaaataagctaacgtcagaacaacgcaacactatagttcaaatg

SEQ ID NO: 438 - DNA, 260 bp, Artificial Sequence
  Description of Artificial Sequence: Synthetic polynucleotide
aagggcaccgctcgcaccgtgaccttcgctctcgacggccacgcctacgagatcgagctgaacgagcgcaacgaggcccggctgcacaaggcgctggcccccttcgtgaaggcgggccggaaggccaagccgacgcgccgacgtagagcgaagtaggacaacgcgcccacgttgttcgatcttggtctacactccccggcatgaagcgagcagtgatctacacccgcgtgagccgggacgacacaggtgagggccagtcc

SEQ ID NO: 439 - DNA, 260 bp, Artificial Sequence
  Description of Artificial Sequence: Synthetic polynucleotide
cgcaccgtgaccttcgctctcgacggccacacctacgagatcgagctgaacgagcgcaacgaggcccggctgcacaaggcgctggcccccttcgtgaaggcgggccgcaaggcgaagccgacacgccgacgtagagcgaagtaggacaacgcgcccacgttgttcgatcttggtctacactccccggcatgaagcgagcagtgatctacacccgcgtgagccgggacgacacaggtgagggccagtccaaccagcgccag

SEQ ID NO: 440 - DNA, 260 bp, Artificial Sequence
  Description of Artificial Sequence: Synthetic polynucleotide
cgcaccgtgaccttcgctctcgacggccacacctacgagatcgagctgaacgagcgcaacgaggcccggctgcacaaggcgctggcccccttcgtgaaggcgggccggaaggccaagccgacgcgccgacgtagagcgaagtaggacaacgcgcccacgttgttcgatcttggtctacactccccggcatgaagcgagcagtgatctacacccgcgtgagccgggacgacacaggtgagggccagtccaaccagcgccag

SEQ ID NO: 441 - DNA, 260 bp, Artificial Sequence
  Description of Artificial Sequence: Synthetic polynucleotide
aatgtgaacctacaaaaccacagtggttcattggatctgaaaagattaccacaacaaaagaaccagaagttactgaaaacgagtgtacattctgcgaaggttaaaaaccattatttttctttaaagtttttaaaactttaaagaaaatgtatacaaataattttctaatttttctttaattttccaagtaataaataagtatgcaaggaaattataaaaacaagttgacacaacaacaacgtaaaaatatagttcaaatg

SEQ ID NO: 442 - DNA, 260 bp, Artificial Sequence
  Description of Artificial Sequence: Synthetic polynucleotide
tcctactggttttgaagaattttctttaatgtgtatgaacaaccctgaatactctggtaaaaattatgattgtcttatggattatattttaccacaatccgaaaaacttatttttaggtctaaagaataaatctttgagattttttaatcttttaattccaatcggaattaaaagaaaatttatttttccaagtaaataaatggaaactaaaaatgttaaacatagactaacacttgaagaatacacttctgtttatgat

SEQ ID NO: 443 - DNA, 260 bp, Artificial Sequence
  Description of Artificial Sequence: Synthetic polynucleotide
acaaagtttaatacacttttaaaggtatacactaatccatctcaaccattaatttttgaaagtaacattgggactaaagataaggataaaataaccatttggattaaatctttaaaacagatggaagaagactacgaagaacaagatcaagaataaattaaattttatagttttaaactataaaattttatagttaataaatggaacccaaacaaagacttttacctaatcaaaaattagatattatcaaaatgtatcaa

SEQ ID NO: 444 - DNA, 260 bp, Artificial Sequence
  Description of Artificial Sequence: Synthetic polynucleotide
actactttaattgaagatataaatggcaccattactacaacttattcttgtattagaggaataagaggattgggtggatttggctcaactggaataaattaaatttttaatttttttaaaaaattaaaaattaaagttcaagtgaactttgctaaaattattattaagtcaattgatttttattttttttaagtaaataaatggaactttcaaacaaatttaaattgacacccgctcaaagagaagatatagttaaaaaa

SEQ ID NO: 445 - DNA, 260 bp, Artificial Sequence
  Description of Artificial Sequence: Synthetic polynucleotide
acccaagaagaactcattgaagaaatgaaggtcatcaacgaccaaaagtatgaaatttaaatttatcaattattttaatgcttaactaagcattaaaattaagaaaatactcgagttgtgctcagagtattttataccttaaccctttctgtcccgtgggacagaaaggtaacctttgaaccgagaaattgaaatatttgaataaatttatcttaaaataaagatggatacttctatatattatggtccaagagacgatt

SEQ ID NO: 446 - DNA, 260 bp, Artificial Sequence
  Description of Artificial Sequence: Synthetic polynucleotide
acagaaaaagagttaatagatgaaatgaaggttattaatgatagtaaacgcaatttataatttattaatagttcaaaatttattaaatttaatttattactacaggtctaaaaaaattctaaccgttgataaagttaaccataattctcacttgtttgttaacacaaaattagaagaaaaagagccagaagtgtgtactttttgtgaaggttaatttttaaacatatttttttaatcccttttaggattaaaaaaaccca

SEQ ID NO: 447 - DNA, 156 bp, Artificial Sequence
  Description of Artificial Sequence: Synthetic polynucleotide
tattctcgttggatgataaagcagatttcattaagatggccattaagtctatcgacatagaatatgtaaagcttaaaaacagacattccattaaaataaatgatatagaattttattaacttatgtacggaagtatagacactcgattaatattta

SEQ ID NO: 448 - DNA, 260 bp, Artificial Sequence
  Description of Artificial Sequence: Synthetic polynucleotide
actactttaattgaagatataaatggcaccattactacaacttattcttgtattagaggaataagaggattgggtggatttggctcaactggaataaattaaatttttaattttttaaaaaaaattaaaaattaaagttcacttgaactttactaaaattattattaagtcaattgatttttatttttttaagtaaataaatggaactttcaaacaaatttaaattgacacccgctcaaagagaagatatagttaaaaaa

SEQ ID NO: 449 - DNA, 260 bp, Artificial Sequence
  Description of Artificial Sequence: Synthetic polynucleotide
aagttagatttttatttttatgcttaaaataagcataaaaataactagtgggtactagttattttttacttttttaaaggttaattaaccttaaaataaaaaatttgctctttaaatttgtttaatttttaaacattgttaataaacaatgttaatataaaaattgaaattttttatttatttgacagtaaataaagaaaatgtctggaagtcataatattaaattaacgtttgaccaacgtcaaactatagccaaatta

SEQ ID NO: 450 - DNA, 260 bp, Artificial Sequence
  Description of Artificial Sequence: Synthetic polynucleotide
agtcaaaattttatttttatgcttaaaataagcataaaaataactagtgggtactagttattttttacttttttaaaggtgaattcaccttaaaataaaaaatttgctctttaaatttgtttaatttttaaatattgtttattaaaaatgtcaatataaaaattgaaatttttttatttattttacagtaaataaagaaaatgtctggaagtcataatattaaattaacttttgatcaacgtcaaactatagccaaatta

SEQ ID NO: 451 - DNA, 260 bp, Artificial Sequence
  Description of Artificial Sequence: Synthetic polynucleotide
cataaaagaaggaaaagcaacttgtcaagggatgcgagtgccagaagtagatatttcaaattgggagataacctcacctgttacagtaatagaaagggatagaaatggggaaaagtattacagttataccggccaagaaagtgcagaccagtgttcttcatcaggacaggaagaaaatcaaagtagccgcatattgccgagtgtccaccgaccaagaagagcagctatcaagttatgaaaaccaagttaattattaccga

SEQ ID NO: 452 - DNA, 260 bp, Artificial Sequence
  Description of Artificial Sequence: Synthetic polynucleotide
cattaaggaaggaaaagcagcttgtcaagggatgcgtgtgccagaagtagatatctcaaattggacagtaacctcgccagtaaaagtgatagaaagggatagagatggggaaaagtattacagttattccagccaagaaagtgcagaccagtattcttcatcaggacaggaagaaaatcaaagtagccgcatattgtcgagtgtccaccgaccaagaagaacagctatcaagttatgaaaaccaagttaattattaccga

SEQ ID NO: 453 - DNA, 260 bp, Artificial Sequence
  Description of Artificial Sequence: Synthetic polynucleotide
atttcagaagatgggcagataacagttcgatttcatgagggaaccgaggtagacttgtaagtgactgtgaccgaaaggttgcagttttttgcgttgtttcgtggtataatgaaattgttctaataattacattattaatgatagttaaatagagttataaataagaaaggaatattgcaaatgataagcaattcaaaaacattgtttcaaaaaacaaaatacaatgattatgataatatagatatgttgctatcacaatt

SEQ ID NO: 454 - DNA, 260 bp, Artificial Sequence
  Description of Artificial Sequence: Synthetic polynucleotide
gatatgagtaattataactagtgaagatggtgatttgagtgaagtatgcagtttatgttcgggtatctacagacagggacgaacaagtctcatctgtagaaaatcaaattgatgtatgtcgatattggttagagcagcatgggtatgattgggatgaaaactcaatatattttgatgatggtattacaggaacggttttattggaacgacatgcaatgcagcttatactagagaaagcgaaaaaacgtgaattacagatg

SEQ ID NO: 455 - DNA, 260 bp, Artificial Sequence
  Description of Artificial Sequence: Synthetic polynucleotide
tataaaagagggaaaagtagcctgtcagggaatgcgagttccagaagtagatatttcaaattgggagataaactcaccagttacagtaatagaaagggatagaaatggggaaaagtattacagttattccggccaagaaagtgcagaccagcgtttttcatcaggtcaggaagaaaatcaaggtagccgcatattgtcgagtgtccaccgaccaagaagaacagctatcaagttatgaaaaccaagttaattattaccga

SEQ ID NO: 456 - DNA, 260 bp, Artificial Sequence
  Description of Artificial Sequence: Synthetic polynucleotide
cataaaagagggaaaagcagcttgtaaggggatgcgtgtgccagaagtagatatctcaaattggacagtaacctcgccagtaacagtaatagaaagggatagagatggggaaaagtattacagttattccagccaagaaagtgcagaccagtattcttcatcaggacaggaagaaaatcaaggtagccgcatattgtcgagtgtccacagaccaagaagaacagctatcaagttatgaaaaccaagttaattattaccga

SEQ ID NO: 457 - DNA, 260 bp, Artificial Sequence
  Description of Artificial Sequence: Synthetic polynucleotide
cataaaagagggaaaagtagcttgtcaggggatgcgagtgccagaagtagatatttcaaattgggtgattacctcaccggttacagtaatagaaagggatggaaatgaggaaaagtattacagttattccggccaagaaagtgaagaccagcgttcttcatcaggtcaggaagaaaatcaaggtagccgcatattgtcgagtgtccaccgaccaagaagaacagctatcaagttatgaaaaccaagttaattattaccga

SEQ ID NO: 458 - DNA, 260 bp, Artificial Sequence
  Description of Artificial Sequence: Synthetic polynucleotide
cataaaagaaggcaaagtaacttgtcaggggatgcgagtgccagaagtagatatttcaaattgggagataacctcacctgttacagtaatagaaagggatagaaatggggaaaagtattacagttataccggccaagaaagtgcagaccagtgttcttcatcaggacaggaagaaaatcaaagtagccgcatattgccgagtgtccaccgaccaagaagagcagctatcaagttatgaaaaccaagttaattattaccga

SEQ ID NO: 459 - DNA, 260 bp, Artificial Sequence
  Description of Artificial Sequence: Synthetic polynucleotide
gaagatgatgatgaagacagaaaaggaccatgggaaatttttgcggttgatagagatcgttttaaccgtagaatactcaatgttgagtctcaaattggttggtgtttccaacctaaacatagagaaaatatttttaatcaacgattaaaagtgtattaattttttaattttttttgaaaattaaaaaatacagtaaataaatgatacgcccacgattgaataaagaacagcgaaacgaagttattgaaaagtatactcaa

SEQ ID NO: 460 - DNA, 260 bp, Artificial Sequence
  Description of Artificial Sequence: Synthetic polynucleotide
aaaagaataacaataaaccaagaagcgcttgatgaaattattcaaattaataaggatattgaagagcagcttttttctaaaatagaagatgtggatatcgtgagatatactaggctttgtttattgaacaaattgagatagtgtaaagaaatgatttaaagttagatttttttttatttacgtttttgtataaataaagaatgactttgtatcctatacataaattgacacttgatgagcgtcaaaatattattgacttg

SEQ ID NO: 461 - DNA, 260 bp, Artificial Sequence
  Description of Artificial Sequence: Synthetic polynucleotide
aaagttaaatttttatttttatgcttattttaagcataaaaataactagtgggtactagttattttttacttttttaaggttaattaaccttaaaataaaaaatttgctctttaaatttgtttaaaaattaaacattgtttattaaaaatgttaatataaaaattgaaattttttatttattttacagtaaataaataaaatgtctggaagtcataatattaaattaacgttggaccaacgtcaaactatagccaaatta

SEQ ID NO: 462 - DNA, 260 bp, Artificial Sequence
  Description of Artificial Sequence: Synthetic polynucleotide
agggtccgaggaatgttccccaaagcgataccacttgaagcagtggtactgcttgtgggtacactctgcgggtgatgaatcgaggggggcccactgtacgggccgacatctacgtccgaatcagcctggaccgcacgggggaagagctcggggtcgagcgccaggaggagtcgtgccgcgagctctgcaagagcctcggcatggaggtggggcaggtgtgggtcgacaacgacctgagcgccaccaagaagaacgtcgtc

SEQ ID NO: 463 - DNA, 260 bp, Artificial Sequence
  Description of Artificial Sequence: Synthetic polynucleotide
tatagttttacttcgtacgaaggttacattaaccttaataattattagtggggagcatccacttttttaagttttatggttaaaaaaaccataaaacttaaaaattaagttttttaaaatattaaccaggtaagatatataaattaacgttaataaaaaaaatgaaaaatttttctttatttaacagtaaataaagaaatatgtctggaagtcataatataaagttaacacttactcaacgtcaaactattgctcgcttg

SEQ ID NO: 464 - DNA, 260 bp, Artificial Sequence
  Description of Artificial Sequence: Synthetic polynucleotide
catccgagaagggaaagcttcctgcattggcatgcgcgtgccagacagtgcagtccaggattggagtatcgatgaacccacagtggtaaaggaggagaacatcagtggcaaaaaacattacagttattcctgccaagaaaactatacaagtcgagcagaatcaacacattcagaaaatccggatggcggcctactgccgagtgtccaccgaccaagacgaacagctatcaagctatgagaaccaggtccgttactaccag

SEQ ID NO: 465 - DNA, 260 bp, Artificial Sequence
  Description of Artificial Sequence: Synthetic polynucleotide
catcaaagaaggcaaggcttcctgccaaggcatgcgtgtgccagagaaagccattgaagagtggaaacttaagacccctgtaacagtgatagaaaggaccgaatatgggcaaaaacattacagttattccagccaagaaaatgcagctgatggtcacccatcagcaagtcaccaaaatcagagtggccgcctattgtcgggtgtccaccgaccaagacgaacagctatcaagctatgagaaccaagtcaattactaccgt

SEQ ID NO: 466 - DNA, 260 bp, Artificial Sequence
  Description of Artificial Sequence: Synthetic polynucleotide
tccggctgacccgcgtcaccgatgctacgacttcaccggagcgccagctggaggcttgccagcagctctgcgcccagcgcggctgggacgtcgtcggggtagcggaggatctggacgtctccggagcggtcgatccgttcgaccggaagcgccgcccgaacctggcccggtggctagcgttcgaggagcaaccgttcgatgtgatcgtggcgtaccgggtagaccggttgacccgatcgatccggcatctgcagcagctg

SEQ ID NO: 467 - DNA, 260 bp, Artificial Sequence
  Description of Artificial Sequence: Synthetic polynucleotide
cctttcaaggtcccaattgaccaagggggctttgccccctgggacattgggtcttaaagggttaatactcactgaaccttttggcaggtagtgattggacgagttacgggacgacagatgtagacccgtactgtcactcttattattaaagtgtattaattttttaatttttttggaaaattaaaaaatacagtaaataaatgttacgaccacgattaaataaagaacaacgtaatgaagtcattaatttatatactcaa

SEQ ID NO: 468 - DNA, 260 bp, Artificial Sequence
  Description of Artificial Sequence: Synthetic polynucleotide
tgtcccgcgtcaccgatgctacgacctcaccggagcgtcagctggagtcttgccagcagctctgcgcccagcgcgggtgggacgtcgtcggggtagcggaggatctggacgtctccggagcggtcgatccgttcgaccggaagcgccgcccgaacctggcccggtggctagcgttcgaggagcaaccgttcgatgtgatcgtggcgtaccgggtagaccggctgacccgatcgatccggcatctgcagcagctggtccac

SEQ ID NO: 469 - DNA, 260 bp, Artificial Sequence
  Description of Artificial Sequence: Synthetic polynucleotide
gttgtcgccgactttgatgatgcgacgcgtgtgtatgccgctgggtgggtctctgacgatgtcgaagttgccgttccacgcctctacgctgggcaacgtggctttgccataactagttagagctgaataagaaatcatttattagttgcagaagccccacaaatttataatatttacactttacatttttaaattaataaatgaaacgtgtcaacaaattaaataaacaagataaagagtcgattttcgacctttacttg

SEQ ID NO: 470 - DNA, 113 bp, Artificial Sequence
  Description of Artificial Sequence: Synthetic polynucleotide
ttaattaaaaaaatagacgtatggaacgataataaaattaagatccactggaatatttaattttttaggcgctttacgccttttttcgtatattaggtatttccaattgaaac

SEQ ID NO: 471 - DNA, 260 bp, Artificial Sequence
  Description of Artificial Sequence: Synthetic polynucleotide
accgaagaggagttgatagaagaaatgaaggtaatcaacgagagtaaacgcgaaatttaaattttttaaacttgttaagtttaaaaaattacttattttaatttagtaaaattattcatcctcatcttcatcaaatggattagtcgaccttggtcttgatggtctgggtaaaggagaaggagaaggtaattctctacttcccggttttttagatgtaaaagcaaccacagatcctagtattccaactacaagtaaagctc

SEQ ID NO: 472 - DNA, 260 bp, Artificial Sequence
  Description of Artificial Sequence: Synthetic polynucleotide
tattgggagagatgatgaacctagttgacgcagttgttacaaaagttctgagtgaaccttacccactctttaataagtattgggtagatgttgagtataattgttacgggcaggtgtccgagactaatattaggtgttcaacggaagaaactgctaaagcaattaaagttgggtatacatttcaagtttaaggagaataaatgaattttaaatattacaacgaaattatagacaaaattgtagctctaaaacaacaaggc

SEQ ID NO: 473 - DNA, 260 bp, Artificial Sequence
  Description of Artificial Sequence: Synthetic polynucleotide
ataaaggagaacaaatgaacatagttgatgcagtcgttacaaaagttctaagcgaaccatatctactctttaataagtattgggtagatgttgagtataattgttacggacaggtatctgaaaccaatattgtgtgttcaaccgaagaaactgctaaagcaattaaagttgggtatacatttcaagtttaaggagaataaatgaattttaaatattacaacgaaattatagacaaaattgtagctctaaaacaacaaggc

SEQ ID NO: 474 - DNA, 260 bp, Artificial Sequence
  Description of Artificial Sequence: Synthetic polynucleotide
gaagaagaaaagttaatagaagaaatgaaggttattaatgacgctaaaaaaaatatttaaatatttttaatccctttaagggattaaaaataaaagtagtttataagcttaatatttatatttgccgtatttatcaaatttagctggagcacccatactttctctaaattttttttcttgctctaatttaagcttttggttttgtattttttcatctgcaaagacaaccatgctttctatagaatcgcaatatgaactag

SEQ ID NO: 475 - DNA, 260 bp, Artificial Sequence
  Description of Artificial Sequence: Synthetic polynucleotide
catcaggctttatttttttgctttttttttcaataagtgcggaaaaattactcccaaacctacctagtaaggtaggaggaatatttgtattccatgaactttggcataaatttatcaggtcgaattagtttgtctgataacttgacttattttccctttagagtgatatatagtgtgccattacataggaaggagagtaaatgtccgtaaaaaagattagagtcaataaacaaaaacacaagcagaggatctgtgcctac

SEQ ID NO: 476 - DNA, 260 bp, Artificial Sequence
  Description of Artificial Sequence: Synthetic polynucleotide
acatcaggctttatttttttgcttttttttcaaaaagtgcggaaaaattactcccaaacctacctagtaaggtaggaggaatatttgtataccatgaactatggcataaatttatcatgtcgaattagtttgtctgataacttgactaattttccctttagagtgatatatagtgtgccattacataggaaggagagtaaatgtccgtaaaaaagattagagtcaataaacaaaaaaacaagcagaggatctgtgcctac

SEQ ID NO: 477 - DNA, 260 bp, Artificial Sequence
  Description of Artificial Sequence: Synthetic polynucleotide
caaggtagccgcatattgtcgagtgtccaccgaccaagaagaacagctatcaagttatgaaaaccaagttaattattacagagagtttatctccaaacacgaggactatgagttagttgacatctatgcggatgagggcatctcagcaaccaatacaaaaaaacgtgatgcatttaaccgcttgatacaagattgtagggctggtaaggtggataggattttggtcaagtcaatcagtcgatttgccagaaacacccttg

SEQ ID NO: 478 - DNA, 260 bp, Artificial Sequence
  Description of Artificial Sequence: Synthetic polynucleotide
caggctttattttttttttggcctttttttcaataagtgcggaaaaattactcccaaacctacctagtaaggtaggaggaatatttgtattccatgaactatggcataaatttatcaggtcgaattagtttgtctgataacttgactaattttccctttagagtgatatatagtgtgccattacataggaaggagagtaaatgtccgtaaaaaagattagagtcaataatcaaaaacacaagcagaggatctgtgcctac

SEQ ID NO: 479 - DNA, 260 bp, Artificial Sequence
  Description of Artificial Sequence: Synthetic polynucleotide
acatcaggctttatttttttgcctttttttcaataagtgcggaaaaattactcccaaacctacctagtaaggtaggaggaatatttgtattccatgaactgtggcataaatgtatcaggtcgaattagttggtctgataacttgactaatatcctttttagagtgatatatagtgtgccattacataggaaggagagtaaatgtccgtaaagaagattagagtcaatagacaaaaacataggaagagagtctgtgcctac

SEQ ID NO: 480 - DNA, 260 bp, Artificial Sequence
  Description of Artificial Sequence: Synthetic polynucleotide
tcaggctttattttttttgtctttttttttcaataagtgcggaaaaattactccaaaacctacctagtaaggtaggaggaatatttgtattccatgaactgtggcataaatttatcaggtcgaaatagttggtctgataacttgactaatattccctttagagtgatatatagtgtgccattacataggaaggagagtaaatgtccgtaaagaagattagagtcaatagacaaaaacataggaagagggtctgtgcctac

SEQ ID NO: 481 - DNA, 260 bp, Artificial Sequence
  Description of Artificial Sequence: Synthetic polynucleotide
catcaggctttattttttttgcatttttttcaataagtgcggaaaaattactcccaaacctacctagtaaggtaggaggaatatttgtattccataaattatggcataaatttatcaggtcgaattagttggtctgataacttgactaattttccctttagagtgatatatagtgtgccattacataggaaggagagtaaatgtccgtaaagaagattagagtcaatagacaaaaacataggaagagggtctgtgcctac

SEQ ID NO: 482 - DNA, 260 bp, Artificial Sequence
  Description of Artificial Sequence: Synthetic polynucleotide
acatcaggctttatttttttgactttttttcaaaaagtgcggaaaaatcgctcccaaacctacctagtaaggtaggaggaatatttgtattccatgaactatggcataaatttatcaggtcgaattagtttgtctgataacttgactaattttccctttagagtgatatatagtgtgccattacataggaaggagagtaaatgtccgtaaaaaagattagagtcaataaacaaaaacacaagcagaggatctgtgcctac

SEQ ID NO: 483 - DNA, 260 bp, Artificial Sequence
  Description of Artificial Sequence: Synthetic polynucleotide
tagtgtagttaggagaatagcatactagtatctcagcgtggtgatatcaccacgctttttctttttgctttttttcaataactgcggaaaatttgtttccaaatttacttagtaatatggagggagtagttttgctgaaagcttgacttatcttccctttagagtgatatatagtgtaccaaaaatagaaaggaaactaaatggcagtaaggttaattaaagcaaaacaagatcataaaaaacaacgcatatgtgcctat

SEQ ID NO: 484 - DNA, 260 bp, Artificial Sequence
  Description of Artificial Sequence: Synthetic polynucleotide
catcaggctttattttttttgcatttttttcaataagtgcggaaaaattactcccaaacctacctagtaaggtaggaggaatatttgtattccataaactatggcataaatttatcaggtcgaattagttggtctgataacttgactaattttccctttagagtgatatatagtgtgccattacataggaaggagagtaaatgtccgtaaaaaagattagagtcaatagacaaaaacataggaagaaggtatgtgcctac

SEQ ID NO: 485 - DNA, 260 bp, Artificial Sequence
  Description of Artificial Sequence: Synthetic polynucleotide
agtgtagttaggagactagcatactagaatctcagcgtggtgatatcaccacgctttttctttttgcttttttttcaataactgcggaaaatttgtttccaaatttactaagtaatatggagggagtagttttgctgaaagcttgacttatcttccctttagagtgatatatagtgtaccaaaaatagaaaggaaactgaatggcagtaaggttaattaaggcaaaaagtgaacagaaaaagcaacgtgtctgtgcctac

SEQ ID NO: 486 - DNA, 260 bp, Artificial Sequence
  Description of Artificial Sequence: Synthetic polynucleotide
aagatgagatgacttaccaactgaccatgatacaggccgatagactcctaaaatctaggattattagtgaggaagttcatcagcaatttaaggaaaagatgcttgaaaaatatcaaccatttattagtagattatcgacctaaagacttgataaatgaggcctttagagtgatatatagtagcgaaaggagtgtatcaaattgagaatagttagacgaattcaaccgatgatgacaccgcaaaaacctaagttgcgtgta

SEQ ID NO: 487 - DNA, 260 bp, Artificial Sequence
  Description of Artificial Sequence: Synthetic polynucleotide
aagatgagatgacttaccaactgaccatgatacaggctgatagactcctaaaatctaggattattagtgaggaagttcatcagcaatttaaggaaaaaatgcttgaaaaatatcaaccatttattagtagattatcgacctaaagacttgataaatgaggcctttagagtgatatatagtagcgaaaggagtgtatcaaattgagaacagttagactaattcaaccaaggatgacaccgcaaaaacctaagttgcgtgta

SEQ ID NO: 488 - DNA, 260 bp, Artificial Sequence
  Description of Artificial Sequence: Synthetic polynucleotide
agggtaactccagtaaaaggaaggaaatatcttatagaaattagagagggtcgatattagtgaagaaagtaattactattcaggctacaccaagtattattaggtcaagttcagatgatttctctttgaagaagcgtagggttgcaggctatgccagggtatcaactgaccatgaggatcaagcaacaagctatgagtcgcagatgcggtactactctgaatacattaatgggagggatgattgggaatttgttaaaatg

SEQ ID NO: 489 - DNA, 260 bp, Artificial Sequence
  Description of Artificial Sequence: Synthetic polynucleotide
ataatgagatgacctaccaactaacaatgatacaagcaaaggtacttctaaataatggagcaatcacaattaaggaatttgaactttttaggcaattgatgcttgaaaaatatcaaccgtttataagtcaattatcgacctaataactggatatttttttctttttgagtgatatatagtagcgaaaggagtgtattaatttgagaacagttagaagaatacaacccataaaatcgccctgcaagccaagatttaaggtt

SEQ ID NO: 490 - DNA, 260 bp, Artificial Sequence
  Description of Artificial Sequence: Synthetic polynucleotide
ataatgagatgacctaccaactaacaatgatacaagcagaggtacttctaaataatggagcaatcactattgaggaatttgaactttttaggcaattgatgcttgaaaaatatcaaccgtttataagtcaattatcgacctaataactggatatttttttctttttgagtgatatatagtagcgaaaggagtgtattaatttgagaacagttagaagaatacaacccataaaatcgccctgcaagccaagatttaaggtt

SEQ ID NO: 491 - DNA, 260 bp, Artificial Sequence
  Description of Artificial Sequence: Synthetic polynucleotide
ttaatggaattgaaaatccggatttgatttatcccggtcaagtgttacgaattgaataatccatcaaggtctgtgtggttgtctatgcaggccttttacatagacagcatttcaactagaaaaagcttgaatgagtgggctgaatacttgataaatttggcctttagagtgatatatagtaaggaagaaaggagaatgggatgaagccaggaaagataagagtttgtgcctatgcgcgggtttcaaccatgacagaaaaa

SEQ ID NO: 492 - DNA, 260 bp, Artificial Sequence
  Description of Artificial Sequence: Synthetic polynucleotide
cggaaggccaagccgacgcgccgacgtagagcgaagtaggacaacgcgcccacgttgttcgatcttggtctacactccccggcatgaagcgagcagtgatctacacccgcgtgagccgggacgacacaggtgagggccagtccaaccagcgccaggagcgcgagtgccgacgcctcacggactacaagcggctggacgtggtggccgtcgagcaggacatctcggtgtccgccttctcgggcaaggagcgccccgcctgg

SEQ ID NO: 493 - DNA, 260 bp, Artificial Sequence
  Description of Artificial Sequence: Synthetic polynucleotide
cattctctacatcccaccagaatttctttcgaatgatatatttgctgcaacactatttctttcgctcttcatgctattactaatcgttgtacttctcatatggacctctccagccctcgattagggttttggcacatacagactaagtagtaaggtttattaccccccgtgccaaaactggtagggtggagggatgcgggatgcccaggccctctatccagaatgtcctcgatttaaggcgggatgaggtccttgagctc

SEQ ID NO: 494 - DNA, 260 bp, Artificial Sequence
  Description of Artificial Sequence: Synthetic polynucleotide
agaatgagctgacttaccaattatccctaaagcaagctcataaactctggcagcaacagctgattacacaagaagaatacgagcaatttcagcaaataatccttcaaaaataccagccctttattagccaattagtgggctaaatactggataaatagcggatttagagtgaatatgtaatcggaaaggagttgtattaattgaagacagttactaaaatacaacagagggtttctccctttcaatcaaaaaagaaagta

SEQ ID NO: 495 - DNA, 260 bp, Artificial Sequence
  Description of Artificial Sequence: Synthetic polynucleotide
aatctcaaggtttgctcgtaataccttggacactttaaaatacgttcggatgttgaaagaaaagaatgtcgcggtttactttgaagatgagaaaatcaatacattgacaatggatggtgagttgctcctagtcgtcttgagttctgtagcgcaacaagaggttgagaatatttccgcaaacgttaaaaaaaggattaaagatgagaatgagtcgaggggagcttatcggatttaatggttgtcttggttatgattaccat

SEQ ID NO: 496 - DNA, 260 bp, Artificial Sequence
  Description of Artificial Sequence: Synthetic polynucleotide
caacaagaacttacctaccaactgactatggcacaggcaaagaagctcctgtcccagggtctgatttctgaagccatcttccaagaatttaaggcaaaaatgctccaaaaatatgagccatttatgagccaattagtggcctaaagacttgataaagaagggctttagagtgatatatagtagcgaaaggagatgtatcaatgaaacaaatcaaaacgatacaagcccaaaaggtaactaccatcaaaaggttaaaggtg

SEQ ID NO: 497 - DNA, 260 bp, Artificial Sequence
  Description of Artificial Sequence: Synthetic polynucleotide
caacaagaaataatctatcagcttaccatggcacaggcgagtcggctcctggcagttgggatgatatctgaagctaattttcaagaatttaaggtaaaaatgctcgaaaaatatgaaccatttatgagtcaattagtggcctaaagacttgataaataagggatttagagtgatatatagtagcgaaaggagatgtatcaatgaaacgaattaaaacgatacaagcccaaaagttaaccgccatcaaaaagttaaaagta

SEQ ID NO: 498 - DNA, 260 bp, Artificial Sequence
  Description of Artificial Sequence: Synthetic polynucleotide
caacaagaacttacctaccaactgactatggcacaggccaagcagctcctgtctcaaggtctgatttctgaagccgtcttccaagaatttaaggcaaaaatgctcgaaaaatatgagccatttctgagccaattagttgcctaaaaacttgataaataagggctttagagtgatatatagttgcgaaaggagatgtatcaatgaaacaaatcaaaacgatacaagcccaaaaggtaactaccatcaaaaggttaaaggtg

SEQ ID NO: 499 - DNA, 260 bp, Artificial Sequence
  Description of Artificial Sequence: Synthetic polynucleotide
cgagttagacgaattctcaagatacataggcttaacgctatgtaaagaagacaaagaagcaattctaaaatacaacagttttcgtaaagctttagcaatcagaaaaaaattaaaattcaattcatttgaaaacgactcttcaagcaattaattaaactaagaataaaatctaatgagagaatacttttaaaatcaatatcatgtccaagttccattcaatatttgacttaaatacagtctggattctagattatgaaaat

SEQ ID NO: 500 - DNA, 260 bp, Artificial Sequence
  Description of Artificial Sequence: Synthetic polynucleotide
caagctgaccaagaccatgtcttagttagactagaagtaaaacccaagacggttagagaagcgttcctgaacgcctataagcgagcgggaggcattcctgtagagtgggacaatcgtctcgctgtttaaaccagcatcctgcttgctgaagagcaagcaggattattgttgtttgttaaatattcattaaaggatttattatgtccatagatacactaggaatcgacgatgaaatcgttttgaccacaatagcaaacatt

SEQ ID NO: 501 - DNA, 260 bp, Artificial Sequence
  Description of Artificial Sequence: Synthetic polynucleotide
attagagaagacgatatccgtctgggtaaaataaaggaaactgaattatgtaccctgtagataaagaatccagaattcgtttaatggaagatctggacaaatggataaatgaacactacctagaaaaagtcacggtcaaagacttaagtcatcaactaggtgtgtttatcccggatgtctaccgtttgtttgctgaacaacgtaataccaccccgggtgagtatcttcgacgtaaacgcttagttaaagccaaagctttg

SEQ ID NO: 502 - DNA, 260 bp, Artificial Sequence
  Description of Artificial Sequence: Synthetic polynucleotide
atcagagaagatgacatacgtttaggtaagatagaggtaacagaaccatgtaccctgtagataaagaatccagaactcgattaatggatgatctggacaaatggataagtgaacattacttggaaaaagtcaccgttaaagacttaagtcaccaactgggagtcttcatcccagatgtataccgtttgtttgctgaacaacgcagtacaactcctggcgaataccttcgacgtaaacgcttagttaaagccaagtctcta

SEQ ID NO: 503 - DNA, 260 bp, Artificial Sequence
  Description of Artificial Sequence: Synthetic polynucleotide
gacctagaaactaacacatattacatagactctagatgggcggaatcattctttcgtaccagtttggcataaaattcaaaatctatttataagtataaatggcctgatttttggttaggtcattttttatcttctaatttagaaaaacgtagttaatatatataattattatgtagatttctagaaaggaggtaaaaccaatggtaagacggaattctaaaattacccgtcaacagaagaaaattcgagatgcatttgta

SEQ ID NO: 504 - DNA, 260 bp, Artificial Sequence
  Description of Artificial Sequence: Synthetic polynucleotide
gacctagaaacgaatacatattacatagattctagatgggcggaatcattctgtcgtaccagtttggcataaaatttaaaatttatttacaagtataaatggtctgatttttagttaggtcattttttaccttctaatttagaaaaacgtggttaatatatataattattatgtagatttctagaaaggaggtaaaaccaatggtaagacggaattctaaaattactcgtcaacagaagaaaattcgagatgcatttata

SEQ ID NO: 505 - DNA, 260 bp, Artificial Sequence
  Description of Artificial Sequence: Synthetic polynucleotide
gtaatctaccaatgcaatgataaatacaagtctagtggtaaaaagtcaatagaaagttgagaaaattctagttgttttttagaaaacagggtgcactaaaaacacctagtgaaaatcgctttttttcaccagtttatccaaggacttgtgcagatcattatctatcttccataagcctccttggtggcgcatagagttggcgattgcgtagtagcgcatccaccagacgcacaaattttctagcggttaagacgatggct

SEQ ID NO: 506 - DNA, 260 bp, Artificial Sequence
  Description of Artificial Sequence: Synthetic polynucleotide
ggaataggtagacgcgctgctggtgttaataaacacccatagaaacggcagtcagggcggcgcaagacatactgcgcggcggttgcaaacgtcaatcgtgttgaaagtgcacgactaatggttgtggggtgcaaatccccacccgcatctcgataggtcaccctaagttacagatacatattcgaaaggggtgacacaagttggaaacaaataaacaaaatgagatacgcaatgcttatgagcatagcgcacaagtccag

SEQ ID NO: 507 - DNA, 60 bp, Artificial Sequence
  Description of Artificial Sequence: Synthetic oligonucleotide
aatatgttattgatgttctttataaacttcaacacgataaagaatatcttaaaaaaataa

SEQ ID NO: 508 - DNA, 260 bp, Artificial Sequence
  Description of Artificial Sequence: Synthetic polynucleotide
gccctgcccgtccacctcaaccacgcaccacccgccctcttttcttactgtcgccatatctctccccttttgaggcaatatatatttggtataggtctatgcgtaagcctcaatacgtgctaaaacgtaccaaatgacgcagataaaacatatttctgcgtatttagggcagataacgccaaacatggagcaaattacgcatggatatggacgcacaggtacaccgggcaacctaccccaagatcgcctaccgcctaatg

SEQ ID NO: 509 - DNA, 260 bp, Artificial Sequence
  Description of Artificial Sequence: Synthetic polynucleotide
aattacactaataatcagtgtaattttattactttaaaaaaacctgccaaaactacataaaaacctcataaaaaaatttcataaaaattgaataaattatgttctaaatacttcattatattttcccacctatattatagtttcacaactattaaattctcgtcctatttgcgatagaaaatcgaaaaaattaattcaagatggatcttcaaaaaatttgtgatcgaatttcccaagaattcgaaacagatattgtaatg

SEQ ID NO: 510 - DNA, 260 bp, Artificial Sequence
  Description of Artificial Sequence: Synthetic polynucleotide
gccgcttactgtcgagtgtctacagaccaagacgaacagctatcaagttatgagaatcaggttaattattaccgtgaatacatcttaaaacacgaagattatgagttagtagatatctatgcggatgagggaatctcagcaactaatacaaaaaacgtgatgcttttaaccgactaatacaagattgtagagatggtaaggtggatagaattttagttaaatctattagtagatttgccagaaatacattggactgcatc

SEQ ID NO: 511 - DNA, 260 bp, Artificial Sequence
  Description of Artificial Sequence: Synthetic polynucleotide
gttaaatgggaatcattgttagataaatttaatagaacatattaaaagacgtaatttacgtctttttttatttgtgtttaacttttaaaccatttagattaaaatatacataaataattaaaaaaatgatttacaaatttcgtattgtataatataataaatatataaggtccaataaggaaccaagaggaggaagaaggatggcagcaataactagaagaagatgggaaaaagaagaagatgagtcattagtaaactta

SEQ ID NO: 512 - DNA, 260 bp, Artificial Sequence
  Description of Artificial Sequence: Synthetic polynucleotide
ggtcacggaactctttggcaatttcttcttccgcagcttcaacacgcacgatacgtagcaccagaacaggttgttcgcttgtcagaatgcttaatcgcagcgtgaattccctgttgtcacgaacggtgcaatagtgatccacacccaacgcctgaaatcagatccagggggtaatctgctctcctgattcaggagagcttatggtcacttttgagacagttatggaaattaaaatcctgcacaagcagggaatgagtagc

SEQ ID NO: 513 - DNA, 260 bp, Artificial Sequence
  Description of Artificial Sequence: Synthetic polynucleotide
ctatgttattctatgtttatctaacgggctcgcgttcgcccagacattatcatatttaattatagattgtcactaaattttatttgatacaaatctatgttattctatgataatacaacgggtcggagttgatataatgaaaaaattgaaaaaatgttaaattgatacaaaatgtaatttataatacaatcaatacaacaatgaaaacagctattatatattgcagacaaagtaataaaaaaaacagtagacatggtatg

SEQ ID NO: 514 - DNA, 60 bp, Artificial Sequence
  Description of Artificial Sequence: Synthetic oligonucleotide
gaactacagagcaagtcaagcgaatttctaagcatgagagccttgttagaaaagagctag

SEQ ID NO: 515 - DNA, 260 bp, Artificial Sequence
  Description of Artificial Sequence: Synthetic polynucleotide
tgtttaaattggaagtttccttatgaagttttatgtgatgaactgttgcacttaaattgacaaatcaacatacatttaaatttcatgagacaataaacgttgatttaatgcgttttttgtcttttttgttttccttatttttttctgttttacaacaaagtggtatcaaaaatggtatcatttgtagttattttagcttcacatataaaaattaaccacactcctaaattaataggtggtgtggttttttggttgtgtga

SEQ ID NO: 516 - DNA, 260 bp, Artificial Sequence
  Description of Artificial Sequence: Synthetic polynucleotide
tgtttaaattggaagtttccttatgaagttttatgtgatgaactgttgcacttaaattgacaaatcaacggattaaaaaccttgtctcctacactaatgctcattttcctgttcctcctcatatttatagacaacttgacctgccataatccctactgcttcatcaagttcaacaccttctttaactgaatgttgaatagcatttgtcattccctcaagtatttcatcaaacgcttgcgctttcttataaacgtcctcaa

SEQ ID NO: 517 - DNA, 260 bp, Artificial Sequence
  Description of Artificial Sequence: Synthetic polynucleotide
cgcagtcaaaatctttggaacgcaccaaaaacttttgacgagttcaaaaacttttgaccgcaccggtaagttttacctgtctcaaaaagtttttggtggcggcgaaataattcgcaacacactgttacaatattttcgttggtacaaatatttttccatgctatagtacgcgcacaccaacggaaataggcgtacgaatcatgagcggtatatacaagataagcttcaacggcaacaacaagcgcgactgctacataggg

SEQ ID NO: 518 - DNA, 260 bp, Artificial Sequence
  Description of Artificial Sequence: Synthetic polynucleotide
ggagtaagccttattagttgagagaaaataaggttgagtaggaacatatctatagatgagagttgacactagggaatggataacaagaaaaaatgcacccacttgcacccagctaaaaatttgataattgcaaaatagcctaattaacattataatataactaaaaaataagtatactaaaatattggtggagaatatctatgaatgaaagaaaagatatagttgaaaatgtaacggtaattcaaaagcagagagctata

SEQ ID NO: 519 - DNA, 260 bp, Artificial Sequence
  Description of Artificial Sequence: Synthetic polynucleotide
gccgaattaacttatcaagtaactatgttgtatgttaaagcgttattaagcaggggtctactaagcatagagcagtgccgtgattttcaagagcaaatgcaaacactgtattcgccactttttagcaaatatatggacgaaacacttgataaataaatggtttagagtgatatatagtgatacaaaaaggaggatacattgtgaaaacagtcaaaaaaatacaacagataagaccagtgaaaaataaaaaattacgtgtc

SEQ ID NO: 520 - DNA, 260 bp, Artificial Sequence
  Description of Artificial Sequence: Synthetic polynucleotide
tcgtgaatctcataaaatttggttttgtgtttctcctgctaaatttagcggcgaggatggtgtccgactcgttttccgataaaattgcgatcgccgcattatcgggtctcgcgttaaaaacagtttcactcatttcgccaaaaatagtttcttggtaaatgacgcccagcgtagtcgggtggtaaaataacttaaacaatatgatttatagaatatcaatggtgtcttgcacattgctacacaattacaaattcgtcgta

SEQ ID NO: 521 - DNA, 260 bp, Artificial Sequence
  Description of Artificial Sequence: Synthetic polynucleotide
tgatgaacatcctaaaaattaaaccatgtccattctgtggtagtctgccgagtatacgatatagcttcgatacattattaattgaatgtactaataaaaagtgtaaattacaaccgtctacatggtcacacgttgattccgatagtgcagaaaaacttataaaaatttggaataaaagaaaagataaggaggaagattaaatgactaaagaagtatggggagaaatagaaggttaccctaatcacaaaataagtagttta

SEQ ID NO: 522 - DNA, 260 bp, Artificial Sequence
  Description of Artificial Sequence: Synthetic polynucleotide
tcctaataattattcggacaactaaaatgatcgagcaccgaaagaatgccactcataaaaaatttgaatcttcgttctcaaagtggagccgccgtttctttaaacactttttatcttccccttggttctctaataacaagaaccaaagttcttttgatgatatcattttccccgccctactcttcttttcaggagcttcaatggttctttgggaagaagccgtaaatgaaaaagatccgagtaataaattaagactgatt

SEQ ID NO: 523 - DNA, 260 bp, Artificial Sequence
  Description of Artificial Sequence: Synthetic polynucleotide
attttacccaaacgatatagaaagctatattgcttataaagcaccattcatagagaaaatttacgctgaaataggactatgaaaaatctaagtttatcgaacttagcaaactataagtttctaagagataaaacctataaaacttgtacggatattgtagggtaggaaaagaaatcttcctctatactaaaataaaccgaatgaaaagggggatcgaagtgaatattatcaagtcgtttaacaatacgattgattatctt

SEQ ID NO: 524 - DNA, 260 bp, Artificial Sequence
  Description of Artificial Sequence: Synthetic polynucleotide
atgagcttatctatcaagttacgatgatacaagtgacaaaactattaaatgatggcgtaattacgaagaaagaatatgaaaaatttcaacaagaactgatcgaaatgtatcaaccgattttaagtaaatatatggacgaaacacttgataaataaagcgtttagagtgatatatagtagtacaaaaggaggaacatacaaatgaaacaaataagaaaaatcattcaaataagactaccagaacaaaagaagttaaaagtt

SEQ ID NO: 525 - DNA, 60 bp, Artificial Sequence
  Description of Artificial Sequence: Synthetic oligonucleotide
ctcttacctaaccttacctgtgtatccaaactggatacatcttgtatacattttgtataa

SEQ ID NO: 526 - DNA, 260 bp, Artificial Sequence
  Description of Artificial Sequence: Synthetic polynucleotide
ctgggtgtcgacccagcgacgctgcgtcgggtgccgtcggagcacacggtctacaactggaagcgcccgtaccgcggccgcacgtacctcgaggaactcgcggtgtggcttcgggcgcaggctgagcgggaagccgcacgctgacctccgaaacgtgggttacagttggaactgttacaccacgacggagagacgagtagatgagcctgcgtgcatacggctggacgaacgacggcaagatcgtcgagtcagaagccgac

SEQ ID NO: 527 - DNA, 260 bp, Artificial Sequence
  Description of Artificial Sequence: Synthetic polynucleotide
ctgggtgtcgacccagcgacgctgcgccgggtgccgtcggagcacacggtctacaactggaagcgcccgtaccgcggccgcacctacctcgaggaactcgcggtgtggcttcgggcacaggctgagcgggaagccacacgctgacctccgaaacgtgggttacagttggaactgttacaccacgacggagagacgagtagatgagcctgcgtgcatacggctggacgaacgacggcaagatcgtcgagtcagaagccgac

SEQ ID NO: 528 - DNA, 260 bp, Artificial Sequence
  Description of Artificial Sequence: Synthetic polynucleotide
ctgggtgtcgacccagcgacgctgcggcgggtgccgtcggagcacacggtctatgggtggaagcgcccgtaccggggtcgcacgtacctcgaggaactcgcagtgtggttgcgggcgcaggctgagcgggaagccacacgctgacctccgaaacgtgggttacagttggaactgttacaccacgacggagagacgagtagatgagcctgcgtgcatacggctggacgaacgacggcaagatcgtcgagtcagaagccgac

SEQ ID NO: 529 - DNA, 260 bp, Artificial Sequence
  Description of Artificial Sequence: Synthetic polynucleotide
tggaactgttacaccacgacggagaggacaccgatgggcgtcgacctatccaggcaggccgcggtacagctccgcgacgcagtgcggaaccccgggccggtgcccagctatcaccatcagatgatggacaagctgagccgagaatggccggtcctacacacagcactgatgcaggtagtcgccgagatcgaggcagacctgtgagtcttcgcgcatacggctggacgaacgacggcaagatcgtcgagtcagaagctgac

SEQ ID NO: 530 - DNA, 260 bp, Artificial Sequence
  Description of Artificial Sequence: Synthetic polynucleotide
ctgggtgtcgacccagcgacgctgcgccgggtgccgtcggagcacacggtctacaactggaagcgcccgtaccgcggccgcacgtacctcgaggaactcgcggtgtggcttcgggcgcaggctgagcgggaagccgcacgctgacctccgaaacgtgggttacagttggaactgttacaccacgacggagagacgagtagatgagcctgcgtgcatacggctggacgaacgacggcaagatcgtcgagtccgaggccgac

SEQ ID NO: 531 - DNA, 260 bp, Artificial Sequence
  Description of Artificial Sequence: Synthetic polynucleotide
ctgggtgttgacccggcgacgctgcggcgggtgccgtcggagcacacggtctacaactggaagcgtccgtaccggggtcgcacgtacctcgaggaactggcggtgtggcttcggatgcaggctgagcgggaagccacacgctgacctccgaaacgtgggttacagttggaactgttacaccacgacggagagacgagtagatgagcctgcgcgcatacggctggaccaacgacggcaagatcgtggactccgaagccgac

SEQ ID NO: 532 - DNA, 260 bp, Artificial Sequence
  Description of Artificial Sequence: Synthetic polynucleotide
ctgggtgtcgacccagcgacgctgcgccgggtgccgtcggagcacacggtctacaactggaagcgcccgtaccgcggccgcacctacctcgaggaactcgcggtgtggcttcgggcgcaggctgagcgggaagccacacgctgacctccgaaacgtgggttacagttggaactgttacaccacgacggagagacgagtagatgagcctgcgtgcatacggctggacgaacgacggcaagatcgtcgagtcagaagccgac

SEQ ID NO: 533 - DNA, 260 bp, Artificial Sequence
  Description of Artificial Sequence: Synthetic polynucleotide
aatacagatatcacaacaacacgcccattcaaacgacgccattcaattagcagcacataataaaaaattgaaaaatatacataatatataataataacaatataataacaacaatgacagcactatcaaacaacaaaatcttaatctccattgaaggaaacattggcgtaggcaagtcaacatttgctagcatgatcaagggacacatagataactctgaaataatatgtgaaccaatagatatttggaagaatatgaaa

SEQ ID NO: 534 - DNA, 60 bp, Artificial Sequence
  Description of Artificial Sequence: Synthetic oligonucleotide
atggaggcatctaaaaaaatcctagacctttccaatcaaaatatatgttatcaggaataa

SEQ ID NO: 535 - DNA, 260 bp, Artificial Sequence
  Description of Artificial Sequence: Synthetic polynucleotide
ctcgaaaaactgccagagtccgccgcatttctggttgttagggaagacgcagcggcatgaacgaatcatgtatacaaatcatgtaaacgaatcatgtaaacgaatcatgtaaacgattcatgtaaacgatttatgtatacgattcatttacacgcattgtgcatatgacaaacgaataaactgctgcacaatgcagaataagggagagaaaaatggtagacgaaatggatacaaaaaatgaaaatggggttcacctgaat

SEQ ID NO: 536 - DNA, 260 bp, Artificial Sequence
  Description of Artificial Sequence: Synthetic polynucleotide
ggttcgtgatgaaactccacacggtgaatgtggtaccgataaagaggaaggcttctttcgttgggacaataaaaactggttagtaacctaccgtcctgattggaatcgttatgataaacaatactactatatcgataactgcggaaataacacaacagcagtagaaatttcataaaaactcgaatttaattattgacaaactgatcctcttgggcgatactctctacatcaaagagaaacatcatccaaggggattttta

SEQ ID NO: 537 - DNA, 260 bp, Artificial Sequence
  Description of Artificial Sequence: Synthetic polynucleotide
aagtgggatattttctgcggggaagacggatatgggtggtcagaggccaaaaagatctgccagaccgaatgctccgagaagatgcgaaacaaatgcttggagaggtgcctggcgtttgaggagcatgagcctgttcgcctgggcgtgtggggcgggttgaccgcgcatgaacgtaacaagatctacggccgaaagtcttcatgagtcagtgcgctgcatctccgaattgttccaagactccatcgaagtttaagcggggc

SEQ ID NO: 538 - DNA, 260 bp, Artificial Sequence
  Description of Artificial Sequence: Synthetic polynucleotide
tcggacatcttctgcgatgaaaacgagaacggcgggaagggcgccgcggaggccaagaagatctgctggtcccaatgcaaccgccgagagaagtgcctcgaggaggcgttgaggttcgaggagcatgagccggtgcgcctcggggtgtggggcggcctcagcgccaatgaacgaaacaagatctacggccgaaagtcttcatgagtcagtgcgctgcatctccgaattgttccaagactccatcgaagtttaagcggggc

SEQ ID NO: 539 - DNA, 260 bp, Artificial Sequence
  Description of Artificial Sequence: Synthetic polynucleotide
aagtgggatattttctgcggggaagacggatatgggtggtcagaggccaagaagatctgccagaccgaatgctccgagaagatgcgaaacaaatgcttggagagatgcctggcgtttgaggagcatgagcccgttcgcctgggtgtgtggggcgggctgaccgcgcatgaacgaaacaagatctacggccgaaagtcttcatgagtcagtgcgctgcatctccgaattgttccaagactccatcgaagtttaagcggggc

SEQ ID NO: 540 - DNA, 260 bp, Artificial Sequence
  Description of Artificial Sequence: Synthetic polynucleotide
tcggacatcttctgcgatgaaaacgagaacggcggaaagggcgccgcggaggccaagaagatctgctggtctcaatgcactcgccgagagaagtgcctcgaggaggcgttaaggttcgaggaacacgagccggtgcgcctcggggtgtggggcggtctcagcgccaatgaacgaaacaagatctacggccgaaagtcttcatgagtcagtgcgctgcatctccgaattgttccaagactccatcgaagtttaagcggggc

SEQ ID NO: 541 - DNA, 260 bp, Artificial Sequence
  Description of Artificial Sequence: Synthetic polynucleotide
tcggacatcttctgcgatgaaaacgagaacggcggaaagggcgccgcggaggccaagaagatctgctggtctcaatgcgcccgccgagagaagtgcctcgaagaagcgttgaggtttgaggagcacgagccggtgcgcctcggggtgtggggcggcctcagcgccaatgagcgaaacaagatctacggccgaaagtcttcatgagtcagtgcgctgcatctccgaattgttccaagactccatcgaagtttaagcggggc

SEQ ID NO: 542 - DNA, 260 bp, Artificial Sequence
  Description of Artificial Sequence: Synthetic polynucleotide
tcggacatcttctgcgatgaaaacgagaacggcgggaagggcgccgcggaggccaagaagatctgctggtctcaatgcactcgccgagagaagtgcctcgaggaggcgttgaggttcgaggagcatgagccggtgcgcctcggggtgtggggcggcctcagcgccaatgaacgaaacaagatctacggccgaaagtcttcatgagtcagtgcgctgcatctccgaattgttccaagactccatcgaagtttaagcggggc

SEQ ID NO: 543 - DNA, 260 bp, Artificial Sequence
  Description of Artificial Sequence: Synthetic polynucleotide
tacgatctagcacaaaaaatgatacctgctacaaagagaagtcctaacatactcaaataaagatgagaaagacacaatcgaaattgcatcaggcctagaaaatgttgaatatgatgaaattctagcatttgaagcataacacacaaaaaccgccctcaattaagagagcggttttgtcctatctaaaggagctttacctcctaatgttgcaaaattttaaatgttggatttttgtatttgtctattgtatttgacgagta

SEQ ID NO: 544 - DNA, 260 bp, Artificial Sequence
  Description of Artificial Sequence: Synthetic polynucleotide
cattctctctgagagtttattattcccagagcagaaaggctttaactctgatcttgaacagagatcgccgaatgagttatcatcagcattcactagaagctgaattacaacttcatctggtgtattctttccgaaaattaaactcatttgttttctatagagagaattttgtttctaacatttttattctttagaaaagtatgacaactcaatctactcttactgtggcgagagcctacgtgcgcgtcagtacggaatct

SEQ ID NO: 545 - DNA, 260 bp, Artificial Sequence
  Description of Artificial Sequence: Synthetic polynucleotide
aaaatcaaagcagagaatgataaatttatgaaaagtgtaactcaaaagatgaacaactagttatcactcaaaagatacttatttttgagaaagcatagatctaaagattttttgttagtaataattattatcaccaacaaaatgacaacaaataaaaaaatttcacaaatgggtatatttttaagtagacgtgcagaagtattcaatgaggaaaaaaaatatttaatgaaccaacccaaaatgatagaatatttgtttaa

SEQ ID NO: 546 - DNA, 260 bp, Artificial Sequence
  Description of Artificial Sequence: Synthetic polynucleotide
acatcaggctttatttttttgcctttttttcaaaaagtgcggaaaaattactcccaaacctacctagtaaggtaggaggaatatttgtattccatgaactttggcataaatttatcaggtcgaattagtttgtctgataacttgacttattttccctttagagtgatatatagtgtgccattacataggaaggagagtaaatgtccgtaaaaaagattagagtcaataaacaaaaacacaagcagaggatctgtgcctac

SEQ ID NO: 547 - DNA, 260 bp, Artificial Sequence
  Description of Artificial Sequence: Synthetic polynucleotide
tgatttagaaatccctatcttttcaaaagatagaagttacattgatcaatatgtatatttaaataaataaatagaaattagaaattagaaaggggttgcattaatttgcaatctctttttaattaaaaacttaaataagataaatttattcaacttttattaataaaatatataattaaaaattatagaggtgatgttttatgaaaaataacaataaatggtcaatagaagaagaacagcaactagcaaatatagtttta

SEQ ID NO: 548 - DNA, 260 bp, Artificial Sequence
  Description of Artificial Sequence: Synthetic polynucleotide
catcaaagaaggcaaggcttcctgccaaggcatgcgtgtgcctgagaaagctattgaagattggagacttaagactcctgtaacagtgatagaaaggaacgaatatgggcaaaaacattacagttattccagccaagaaaatgcagttgacagtcacccatcagcaagtcaccaaaatcagagtggccgcctattgtcgagtgtccaccgaccaagacgaacagctatcaagctatgagaaccaagtcaattactaccgt

SEQ ID NO: 549 - DNA, 260 bp, Artificial Sequence
  Description of Artificial Sequence: Synthetic polynucleotide
aaaaaatctaagcctggtgaagtacatcaggctttttctttttgattttttcttaaaaccggaaaaatctatcttgaaagtacctatttaggtaagaggacaataaagacattttgttaaagtacagggttgctgattacttgactaatattgcgtttagagggatatatagtgtgtaaaaacttcttgtaggaggaaaaatgaatataagaaaaattgaagcaaagaataacaatagaaaaaagagaatttgtgcatat

SEQ ID NO: 550 - DNA, 260 bp, Artificial Sequence
  Description of Artificial Sequence: Synthetic polynucleotide
aaatcggacatcttctgcgatgaaaacgagaacggcgggaagggcgccgcggaggctaagaggatctgctggtcccaatgcaaccgccgagagaagtgcctcgaggaggcgttgaggttcgaggaacatgagccggtgcgcctgggggtgtggggcggcctcagcgccaatgaacggaacaagatctatggccggcgcgggtgacaaggggtaagtgtcggcggtccggctgctcgaatctgactcggtcaagtggcggc

SEQ ID NO: 551 - DNA, 260 bp, Artificial Sequence
  Description of Artificial Sequence: Synthetic polynucleotide
aaatcggacatcttctgcgatgaaaacgagaacggcgggaagggcgccgcggaggccaagaagatctgctggtctcaatgcgcccgccgagagaagtgcctcgaggaggcgttgaggttcgaggaacatgagccggtgcgcctcggggtgtggggcggcctcagcgccaatgaacgaaacaagatctatggtcggcgcgggtgacaaggggtaagtgtcggcggtccggctgctcgaatctgactcggtcaagtggcggc

SEQ ID NO: 552 - DNA, 260 bp, Artificial Sequence
  Description of Artificial Sequence: Synthetic polynucleotide
aagtgggatattttctgcggggaagacggatatgggtggtcagaggccaagaggatctgccagaccgaatgccccgagaagatgcgaaacaaatgcttggagagatgcctagcgtttgaggagcatgagcccgttcgcctgggtgtgtggggcggattaaccgcgcatgaacgcaacaagatctacggccgaaagagttcatgaagtacgggaagtgccggcggcctaattgccagaactccactaggtcaagggggtcg

SEQ ID NO: 553 - DNA, 260 bp, Artificial Sequence
  Description of Artificial Sequence: Synthetic polynucleotide
cccatcgccaccgcccgccgcgcggcaaacctcacccagcaccagctcgcgacccgcgtcggggtcagccgtggagccgtcgcccagtgggagatggagagcggcacacgccccgacatcgacaacgccaagatcctttgtgaggtgctcggcctgacgcttgagcagatcttcgccgaccagccgggcagggcagcctgatgcgcgccttcgcctacgtccgcgtcagcaccgaagagcaggccgacagcggccacagc

SEQ ID NO: 554 - DNA, 260 bp, Artificial Sequence
  Description of Artificial Sequence: Synthetic polynucleotide
aagtgggatattttctgcggggaagacggatatgggtggtcagaggccaaaaagatctgccagaccgaatgctccgagaagatgcgaaacaaatgcttggagagatgcctggcgtttgaggagcatgagcccgttcgcctgggtgtgtggggcggattaaccgcgcatgaacgcaacaagatctacggccgaaagagttcatgaagtacgggaagtgccggcggcctaattgccagaactccactaggtcaagggggtcg

SEQ ID NO: 555 - DNA, 260 bp, Artificial Sequence
  Description of Artificial Sequence: Synthetic polynucleotide
aaatgtgtcattatattaacttctattttattgcctatataatttatccatcaagattaatcttgtattttgatcgcaaattttaaataattaaatacaaaaaattgatatttattgatattcatgaaaaaccatatatataaacaaaatgaacaacataaacttctcgagatcctttaaattatctatttttcaaaacaatgaagcaagttaatcaagttttatcccaagtttttccgtatgtatttaataatatacct

SEQ ID NO: 556 - DNA, 260 bp, Artificial Sequence
  Description of Artificial Sequence: Synthetic polynucleotide
gagacgcctgcgaagtggcgtcagcccgctctccggggtcgcggtctgcatcacctgtgaccgtccgttgcaccacgaccggtatctggtgaagcggccctacggcgactacccctaccggtactaccggtgccgagaccgccacggcaagaacctgcccgccgagctggtcgagaccctcatggaagagtccttcctggcccgcgtgggcgactatccggtgcgggagagggtctgggtccagggggacacgaattggg

SEQ ID NO: 557 - DNA, 260 bp, Artificial Sequence
  Description of Artificial Sequence: Synthetic polynucleotide
aacgtaaggatgatccagattttgaatttaattctacttatatttgtacactagtggatcgtatgatgggagaatctggacagactgctgaagacctagatatcgaccccgaaattatttaaaaataaaaccttgacacaacttatcctctgaactaatatcttatcaaaaggtaaaaacgagttcagaggatttttattatgattaaaaaatacgtagtttattctagacaatcaaagaagtcaggaatgaaaggtcaa

SEQ ID NO: 558 - DNA, 260 bp, Artificial Sequence
  Description of Artificial Sequence: Synthetic polynucleotide
gttggttcggattatgaatacgacatcagaagatacttaatggctaattacggactgactcctgcggaaatccgtaaacataaaggtccactcactcgtcgtaacaaaaccaagcagtttgttcgttttgttaaaactaacgccgacttatgcattagagaagacgatatccgtctgggtaaaataaaggaaactgaattatgtaccctgtagataaagaatccagaattcgtttaatggaagatctggacaaatggata

SEQ ID NO: 559 - DNA, 260 bp, Artificial Sequence
  Description of Artificial Sequence: Synthetic polynucleotide
gaagtctacggggttaatatcgttgaactccgggaaactttgagaggcgcttgtgtctgataagaattccagagagttcaagaagctcaaaaatgcggctaagaaatattgtttggaacctaatgcttcggaattagttttaaagaaaacagggatctcacccactagagtcattaaactattccgtgatgcaggtgaagggagtttgtatgattacatcacccatttaaaaatgttagaagcgaagaaactcttagacg

SEQ ID NO: 560 - DNA, 260 bp, Artificial Sequence
  Description of Artificial Sequence: Synthetic polynucleotide
aattatgtattgagatcggtggattcgggtggggagaaaaaagaattaggtggtgtttaatcctcgggcttgtaagtatgtttcttgattacgtttcatacagaggcatccgctattgtgggttccgtcattgcaataataattatttaaaacgtagtcgctatttgggggaagtttcgtcgttttaaatgggacgggccattgagggctgcaacatgcaggtgagcatttattgttggtcaaagtataatcgcttatat

SEQ ID NO: 561 - DNA, 260 bp, Artificial Sequence
  Description of Artificial Sequence: Synthetic polynucleotide
taccaagagtacaagtatgacaaatacgaaaagggtctcctagacgataaacctaaacagaagtctctaatctctcaatggattaaagctaagaaagataaagtctgtccgatgatcgattgggaagaataaaatctattgacagcgtggaaaccttttgctagaatctccttatcaacttggtaaggagatttttatttatggctaagaagtatgtaacttataaacgtgtttcaactaagagacagggtgaatcggga

SEQ ID NO: 562 - DNA, 260 bp, Artificial Sequence
  Description of Artificial Sequence: Synthetic polynucleotide
ctatatttacaagagttacactctacttttgtagattaaatgtcaatttatttgtttgtttgtgataatattgaaaaacatcaattaaaacaatcaaaaaatgtgacataaatcaataattttatttttacacaacttcttgatttctgagcctggctatctctattcttattcaaagcctctttagaatggtggtggccatgtcagcagtttgttacttcatactcataaagaaacctataagctttcaatttcttaag

SEQ ID NO: 563 - DNA, 260 bp, Artificial Sequence
  Description of Artificial Sequence: Synthetic polynucleotide
ggagtgattagccaagggtctttggcaaaacttattaagaaatataacctaaacagttgacacaaagattaaataatattatcttgtacacagattaagaaataaggagaaaatcatgattaaatgtaaagaagacctgtacaataaatacatcccgatggaagaaggtggattacgtggtaaattcatcgaggtttgtaacaagtttggtattcacccagcgtttagttttagtattgacatgagtcagaaatattacg

SEQ ID NO: 564 - DNA, 260 bp, Artificial Sequence
  Description of Artificial Sequence: Synthetic polynucleotide
ggagataaggtaggatttgttgtaccgaggtacagaacccttaaagagggtactatattaaaactaggtaataagatggccaccataggatatcctgatagcaaaggaaaagaagttaaggttactagatactactcacaagtagttttcgtagggagtgccactaagtaatcaaataaaataatcaaaaattaataaagatggataataagaaatacgtagcatactacagggcgtcgacagaaagccaaagagatgga

SEQ ID NO: 565 - DNA, 260 bp, Artificial Sequence
  Description of Artificial Sequence: Synthetic polynucleotide
ttagaatatgttaattataactatttagaactaaatagtattaattagtataattaaaaattagacgacttaaaattataaatataggattaataataatttatagacctcctaaatttaatgtatctttttttttatattgttatgtatatatgactactaaacctagagcgttagcatacttaagggtatctactacaatgcaatcagaagaaggtatttctttagatactcaacttaaaaagattcaagattattgt

SEQ ID NO: 566 - DNA, 260 bp, Artificial Sequence
  Description of Artificial Sequence: Synthetic polynucleotide
aacatcgagcgtatcatcagtgtcgcaaccagtggcaatagaagttctttttgtatgtcgttccgttctcactttggtttaactccgacggaagcccgtcgttatcctgaacgtgttatgcgtttaaagggaacagaaggattaagaaaatatatcgaggtaggtgttaagaacatcacactaagttaaggtaataaaccatgaaagcagaatttagagataagctttttaaagatacgttaaaatggatagacaacaac

SEQ ID NO: 567 - DNA, 260 bp, Artificial Sequence
  Description of Artificial Sequence: Synthetic polynucleotide
tttaaacaacaattccgtacacatcctcaaacgtacgccaattcttttaagagtaagtagttatggatacccaagaaaccattttaaaaatcgaagccgcagtcaaagaactatttgcagaaagcaaagcctccgctaagatttacgcacggctcaatatgagtgggccaagcatgggacgtttcctagagaaacataaccacccatcggttaaggagatgttagtagaagctcgcatgggacacgctaaacaccttctt

SEQ ID NO: 568 - DNA, 260 bp, Artificial Sequence
  Description of Artificial Sequence: Synthetic polynucleotide
aatagttgttggtctgcttctactgtaaaacgtgcattagatagacttcaaacactttaacaaaggagatattatgagtgtttatttaaataaagtaagacgattcgtaaggaagcattacgatttttttccaatcatattctatgcagctgtaatcatgtttatgttatatgcatttatgattgtcggttgtgccttggacgatgcttgttacgaggttcacatgagatcaatagaggaggttccgtatgtctaccccc

SEQ ID NO: 569 - DNA, 260 bp, Artificial Sequence
  Description of Artificial Sequence: Synthetic polynucleotide
gaccagacctatacggactggcgtaaatctttacgcatgcgcatggcttcagacttaatccgagataacccgaagattgacgtaacacgtatccatggacaacttggcatctgttccttccaatacttcgtaactttatttaaacaacactaccgtacgcatcctcaatcgtacgcgaatgcattcaagagaaaatgaatatgactgaccacgaattagcactacaaatccaagactacgttaaagaaatctatatgaaa

SEQ ID NO: 570 - DNA, 260 bp, Artificial Sequence
  Description of Artificial Sequence: Synthetic polynucleotide
aaaataggtcaaaatccctaaaaaaacaacatagtttttgcctgaaagtactgaaaatgttatactatcagcatgtttaattaaaaaaagatttagtttaagtactgttttaagcacgataatgcctaaactagtataaaactacctagatatttagttctactctaaaaacattctaaaaacatgcttaaaaggaatatatgtcacagcttgacacaccaacagcacgccaaccagttctatatggctatgctcgagtt

SEQ ID NO: 571 - DNA, 260 bp, Artificial Sequence
  Description of Artificial Sequence: Synthetic polynucleotide
caggtaaaggtgtgattttgaaatgtaagtatgacgaagaagatattattgatatcgatagtgattctcatttaaccctgaaaaaggttatacctgttgaggtcattaaatctctcaatgaattaaataaacattgacacacaatctccattgaactattatctaatcaacaggtaacaagttcattggagatttttattatgtcacgcaatatttcttacaaacgtgtttcaactacacatcaatcttgtgatcgtcag

SEQ ID NO: 572 - DNA, 260 bp, Artificial Sequence
  Description of Artificial Sequence: Synthetic polynucleotide
agttggaaacagagtacagtacaaagagtgttagaaagacacaatattaatttattctaaggggtaatatatgcaaatacctgaaggttcaacacactattatgcagagggtagtaggtactacatggtacacgagaatatgtggtggttttatttaagtaagtgtaatgaatggcgaattagttctcatttaggagattggttcgaaaataatttaattgaaatttaaggagatactagtggctgatttaacttgcaca

SEQ ID NO: 573 - DNA, 260 bp, Artificial Sequence
  Description of Artificial Sequence: Synthetic polynucleotide
agttggaaacagagtacagtacaaagagtattagaaagacacaatattaatttattctaaggggtaatatatgcaaatacctgaaggttcaacacactattatgcagagggtagtaggtactacatggtacacgagaatatgtggtggttttatttaagtaagtgtaatgaatggcgaattagttctcatttaggagattggttcgaaaataatttaattgaaatttaaggagatactagtggctgatttaacttgcaca

SEQ ID NO: 574 - DNA, 260 bp, Artificial Sequence
  Description of Artificial Sequence: Synthetic polynucleotide
ttacggtaaatcctatcgtgaatggagaaaggatactaggatgaaattagctaaggagttactccacaaaaatccaagtgttaagatttcagacttagcgactaccgtaggttcttgtagtgcgacctatttacggaagcaataccaagaagtctatggagttaatattgttgagctccgggaaactttgagaggtgttcgtgtctgataagaaatcgaaagaactcaagaagctcaaaagtgccgccaagaaatattgt

SEQ ID NO: 575 - DNA, 260 bp, Artificial Sequence
  Description of Artificial Sequence: Synthetic polynucleotide
aagttcgagaaaaaatatggaatgggacctaaacgttatcaacaacacacccgtctttaaattaattcctaacccaaggtacattatatgtgagcggtacaagattaggtttagctagactagcgtgtccgaaaagaaaaggtgtatgccgcgagtccgacctaggaagttattccttcattacaaccgctcacaactattctggttcaggggggagtcctccttgtcaacatcgatgtcactaaagccatcccctgaac

SEQ ID NO: 576 - DNA, 260 bp, Artificial Sequence
  Description of Artificial Sequence: Synthetic polynucleotide
aagttcgagaataaatatgggatgggtccaaagcgattccgtcaactgtcaaggttgtaattaattcctaactcagtgtacattgtatgtgagcggtacaagattaggattagctagactagcgtgtccgaaaagaaaaggtgtataccgcgagtccgacctaggaagttattccttcattacaaccgctcacagcttactcatatcgtgttacgagtataaagcgccgatcgccacccccatggcgatcactattttca

SEQ ID NO: 577 - DNA, 260 bp, Artificial Sequence
  Description of Artificial Sequence: Synthetic polynucleotide
ggtaagtttaccccctcccaagcactgcgcgcactatcttacttaaacattacacgataaattacaggggaacttatttatggcggtaccaattatacctaaaactgaatgttacactacacctgcaaagaaaagctctagcttcggactggagatgaatgcatctacacttaaagctctttctcagaccctatatgactacaagattgaagcagttgttcgagagtacagtacaaacattactgacagccataacgatt

SEQ ID NO: 578 - DNA, 260 bp, Artificial Sequence
  Description of Artificial Sequence: Synthetic polynucleotide
aaaaaatattgggattctattatggttggaactgtatacagaaaacataataaaaaataattttttataaaaatcatacggtcgatagtttatgggaattttcaatgtatacgagaaataataataataaattcgtacggtcgatagttcatgggaattttcaatgtatacgagaaataataataataaatccgtacggtcgatagttcatgagaattttcaatgtatacgaaaaatatatttttaatatttcgtataca

SEQ ID NO: 579 - DNA, 260 bp, Artificial Sequence
  Description of Artificial Sequence: Synthetic polynucleotide
gccgccggggccggcgccaccgagctgttgagcgcctccctgtccgaattaaaattttaaagaatttttgttactaaatggagaccgaccctctgttgggaccggattccgagtcctctggcgcgtcgtcctcgctgccggtggtgcccggcatgtccgcggacccggattcggccgccgccgcgcgaagcgccacaccggtgttggcggcggcggcgcccgtcctgccggccacgatcgtccagacggagcccgtgccg

SEQ ID NO: 580 - DNA, 260 bp, Artificial Sequence
  Description of Artificial Sequence: Synthetic polynucleotide
tataactggctccaaaataagagagccagtgacaaaaagcaatcaatgatgaattcatgaaaagtgtcaccaaaaaataaacatctaagtatcatgcagatgtttattttaaggcctaaagaatttttgttagtaataattattattaacaacaaaaatgacaacaaataaaaaaattacacaaatgggaatttttttgaatagacgtgcggaagtatttaatgaggaaaaaaaatatttaatgaaccaacctaaaatga

SEQ ID NO: 581 - DNA, 260 bp, Artificial Sequence
  Description of Artificial Sequence: Synthetic polynucleotide
gccgccggggccggggccaccgagctgttgagcgcatctctgtccgaattaaaattttgaagaatttttgttactaaatggaaaccgaccctctgctgggaccggattccgaagcctccggcgcgccggccgcgctgccggtggtgcccggcatgccctcggacccggacctcgccaccgcgcggagcgcggcgccggtcgcggcgccggtcgcggcgccgccgcccattccgccggccgcgatcgttcagaccgagccc

SEQ ID NO: 582 - DNA, 260 bp, Artificial Sequence
  Description of Artificial Sequence: Synthetic polynucleotide
ttccatatcaactgacaaaattaatttccataatggaacaccatggtttcgcgtatcgacaacaaatcgtcgtgttcaaaggctgaacagctgttggtgacaaatgacatctattgtgtcgtttgtcatctatatgggtcatatcgacagaattattaatttaacaaacacaaaccataacatttcaacaatggaatgaaatgtcctcgaaaaatgtcaaagaaaccgcaaaattcgttgctcccggaagagctcgaaaa

SEQ ID NO: 583 - DNA, 260 bp, Artificial Sequence
  Description of Artificial Sequence: Synthetic polynucleotide
tgtgcaggtaacggtttcggtcaaaatgcacatatacgaactggggtagaatatgtaactaagcttgcaaagagaaagtttaaatagtgtacctaaaatttaggtaaaatcaaaaaattaatttattgacttacatccccgttcagctatacttggtctaaagataagaaattaactataactaacggggatttttatttatgcgtaatattgggtaccttcgtgtctcaacagataacggttcgcagaaaacagacaga

SEQ ID NO: 584 - DNA, 260 bp, Artificial Sequence
  Description of Artificial Sequence: Synthetic polynucleotide
atatttgtggcgaaaatgaatggtttaaggaaatatagaaaaaaagaagaaaaaaaatgaaaaataaaagagaatatcaaagaaagtaaagaatgtgtgttactagtagcatcccttataatcaaatggatttaatttatactctacaaatttgccttcattttcatcaaaaataaatttatcaataactgatttctttgtgaataaatatttaaaatgtgaatataatagcatatttattttttcgtcgtatttattag

SEQ ID NO: 585 - DNA, 260 bp, Artificial Sequence
  Description of Artificial Sequence: Synthetic polynucleotide
aaaaagttagagacaaaatttatgcaaaagcaattgaacaattattttaaaaccaagtgattccattggtatctcaatatcctaatttttctttatctacgtaataatcaacaaaaccattttcagctccttggatttgttttggtgtcatacataaacaaccagtgccaccagtattgtttgtgcaaacataatcggacgctaaatatttgtttttaccatctttgcatacaaaaggatcatatgttcctttaaatggt

SEQ ID NO: 586 - DNA, 260 bp, Artificial Sequence
  Description of Artificial Sequence: Synthetic polynucleotide
aaagatgaaggacaagggggtggttctgagatgcaggaaggtaaggatacttccgagtgaggaacagcgagaaatactcaagtcttgtttcggtatccatcgacacatctataacgagtgtgtcaaggccgagaaggacggggacatcgatggagctggggttagggagtgctacaagtggcgaaaggctttcactacaagagaggactactatggacaggggaagaattggaaagacgattgccccagccataccaaac

SEQ ID NO: 587 - DNA, 260 bp, Artificial Sequence
  Description of Artificial Sequence: Synthetic polynucleotide
gaaactttgtgttactttacattgaaaggttttcccgaatcagtgaataagttcatggttgatgaatggaattaccgtattgacatggaaatttagaacaaattgaaaaattaatttatacaaaacgtttgacacatatgaccctctttggtaatctttacacatcaagtagtagagaacaaccaaagaggattttatttatgagacatatcggatatcttcgcgtaagtaccatatcacaggtgaccgaccgacaactc

SEQ ID NO: 588 - DNA, 260 bp, Artificial Sequence
  Description of Artificial Sequence: Synthetic polynucleotide
ttctttgcataagatttcctattgtgaaactgatctttagttatactgcctgatgataacccttcgatgataaccataacctgttgtgtaagcactggttggaaggctagtaattccttgtaattcatagttgactcctaagtaattgtggtataatatacattatatcatgtaatgagtattgaaagggaaattaatttatgagacatatcggatatcttcgtgtcagcacgcaagaccaatcggtatcaagacaactc

SEQ ID NO: 589 - DNA, 260 bp, Artificial Sequence
  Description of Artificial Sequence: Synthetic polynucleotide
cctacaaccattgtgcaaagaatgtaactctttgaaaggaactgaaacgatagattatagggtagcagataaacacaaagctaggaaaagaaagttagagtgtagaagactgaggaataaaaacaattgacttacatccccgttcagttatacttggcctaaagataagagattaactataaccacggggaattttatttatgagacatatcggatatcttcgcgtcagtacgatctcgcaacaggttgatcgacaacta

SEQ ID NO: 590 - DNA, 260 bp, Artificial Sequence
  Description of Artificial Sequence: Synthetic polynucleotide
aagccatcacgcaagcgcactagcgcaaattcctcaagatcgcgaagcaatacccgatgaattcaacggcgtcgacctgttcggcgctgatgatttcggacttataggcgggattgtctgttagcaagtgcagctcgcccccgtgcatgcgctgcactcgccgcaatctgatgctatcccccatacgcaacacataaacgccgtcaacatcacgcggccgtcgatccacgagcaccacgtcgccattgttgattgttgtc

SEQ ID NO: 591 - DNA, 260 bp, Artificial Sequence
  Description of Artificial Sequence: Synthetic polynucleotide
ttgttttttttttaataaaattacactgactattagtttaattttattgaaaacctgcacaaaactacataaaaaaaacctaataaaaattgaataatttatgttctaaatacttcattatattttcccattaatattatagttttacaactattgaattctcatccgtttcgtaatagaaaatcaaaaaattaatccaaatggatcttcaaaaagcttgtgatcgaatttcccaagaatttgaaacagatattataatg

SEQ ID NO: 592 - DNA, 260 bp, Artificial Sequence
  Description of Artificial Sequence: Synthetic polynucleotide
atgtccaatcaatagcccacacaatgtagacaaggactatcttgggacatttgttgaatacacttacatagacaaaaacaagcgtaaacaacatgtcgaggaatactgcttaagagtagaatggctgtaaataataaataccttgacaagtgtttattcgttttgtaaagtgagaatacagcaatggtttaggagtggttatgaaaaagtttgttgtttacagtcgtctttctaaacagaaaaaaggtgaggcacaatat

SEQ ID NO: 593 - DNA, 260 bp, Artificial Sequence
  Description of Artificial Sequence: Synthetic polynucleotide
tagataacatattggaagaagaatacgggtttacgtctcgtcaggcattttatgagtatatcacagactaccatgcaaataaggtggttacgatcgcagatgctcgtaaaataaaagataaaaagagtgaataaaatgcttgactctaacatagggtatatgttacaatattaatagagttaagggaaggaggaaagatagtgttatgtcggggttgcagtaaagaaatagaacctgactataggtatggaaatactcac

SEQ ID NO: 594 - DNA, 260 bp, Artificial Sequence
  Description of Artificial Sequence: Synthetic polynucleotide
gtaatgttaaaaggtagattgtttaaaagttacaatttaaaaagctggagttttaaaccagattgttcagcagtatatccacaaatatacaatggatataattggagtagtgataacattaaagttaaaaaaaaaaacaaagcgacttgttttaaaatattcaatcatgcaattaacagaatgaaagtgaggattaaataatgaataaaagatatgtaggctacactagagttagtacagataagcaaggtaaggaaggt

SEQ ID NO: 595 - DNA, 260 bp, Artificial Sequence
  Description of Artificial Sequence: Synthetic polynucleotide
tcaagaaggctactataagaaggaggctgtctaatgaataaagatcaaaaagaattattaactgatgttattgataagggtattgcacatgaaaaatctaaatacccagattgggatgataacaaacatttaattaaagttgatattaagtttgtagataacaacttacatttacattttactagaaaggataaaaaataatgaaaagatatgtaggctacactagagttagtacagataagcaaggtaaggaaggttat

SEQ ID NO: 596 - DNA, 260 bp, Artificial Sequence
  Description of Artificial Sequence: Synthetic polynucleotide
gggagtttgttcgatgccaaagcggtacaacgtctttgtgcaaaattgaatattaaataaggaggaaacatggcagttcaatcttttgaggagactgttaaaaaacaattcctatcgaagcgagcgatggttgaatttttgcattttctcgaagtagatagggtacttattgagactacaccagatggtaactggcaagtctcgtatattgccaccaggcatatcgtagacagtacgaaagaagaaagttcggaagttac

SEQ ID NO: 597 - DNA, 260 bp, Artificial Sequence
  Description of Artificial Sequence: Synthetic polynucleotide
gggagtttgttcgatgccaaagcggtacaacgtctttgtgcaaaattgaatattaaataaggaggaaacatggtagttcaatcttttgaggagactgttaaaaaacaattcctatcgaagcgagcgatggttgaatttttgcattttctcgaagtagatagggtacttattgagactacaccagatggtaactggcaagtctcgtatattgccaccaggcatatcgtagacagtacgaaagaagaaagttcggaagttac

SEQ ID NO: 598 - DNA, 260 bp, Artificial Sequence
  Description of Artificial Sequence: Synthetic polynucleotide
gttaagagcttacaaagtggagataaaaccaactcaagaacaaagtataaaaattcataaaactattggagttagtagatttatttataatttttatatagctcataataaagcaatttatgaaaaagaaaataaatttataagtggtatgcaattttctaaatggttaaataatgaatatattcctaataatcaagataaaatttggattaaagaagtttcttcaaaagctaccaaacaatctataatgaatggagaaa

SEQ ID NO: 599 - DNA, 260 bp, Artificial Sequence
  Description of Artificial Sequence: Synthetic polynucleotide
atttatttcccagccaattgccaacaagagggatggaaaaatcatggtatctatcattgattatcatgtactacaaacattatgttaaaaaaatagacagtaatggagggatattacgaaataaaagataagcatccagactacctattaattttcaggaaagcagatttttgtgaaatgtatgcgaacgatgcagcaatcgcttccaaagttttgaacattgacatcagaaaacagacccacggacatggccaaacgct

SEQ ID NO: 600 - DNA, 260 bp, Artificial Sequence
  Description of Artificial Sequence: Synthetic polynucleotide
aacaagcatttaaaaagcttttaaaagccttgaatttaaaagaaagaaagctatacaccacacggcacacttttgcaagcttgatgctaagccagggcgaagaggccatgtgggttacaaacagaaactaaaatcctataataacctataaaatactataatttttgtatagttgttaagttttgtgttatactgcttgcatgaataaaagaatgctatcaatcggtcaagcgagtaagcttttgggtgtaactatccaa

SEQ ID NO: 601 - DNA, 260 bp, Artificial Sequence
  Description of Artificial Sequence: Synthetic polynucleotide
aagctttacgctttcgcaggagaagataaaggcatgctttatagcgggcttttgggcgtgattgacaattgtccggtagtggatgcaggagtttggaataaattgaatgtgggtaaaaaacagcaactaaaatcctataacaatccataaaacactataatttttgtataggttattaagttttgtgttatactgctcgcatgaataaaagaatgctatccatcggtcaagcgagtaagcttttgggtgtaactatccaa

SEQ ID NO: 602 - DNA, 260 bp, Artificial Sequence
  Description of Artificial Sequence: Synthetic polynucleotide
aaaacagttggacttgtatctgctatgtttggaatattatctgagaatgacaaggaggcaaaagtaaaataccaaaaaagattttacgagaaagttcctggtttacaatttccagatgattgggatcagttaagtgtagaagagaaagaaaaaagacttgatggtgtaaacaaaatagcactagaaaagagaggtaactaatgaataagattgtagctttagtaagagtaagtacagacaagcaagatgtaaacaatcaa

SEQ ID NO: 603 - DNA, 260 bp, Artificial Sequence
  Description of Artificial Sequence: Synthetic polynucleotide
attgcggtcgtcgagctgccagtcagctacgaggacgaggacgggcaggtctattacggcgccgacggcggtattcgcgtagacacgaccgcgcggggcaccgatttcccgctgatctacgtcgaccacacgccgtatgccccagaaacgctgcgccgcgacgccgccgagatgctcgccgccgcactggaggccgagaagtgatcacctacacctgcgactcgtgcaccgcgccgatcaccgggccggtacgtctcagc

SEQ ID NO: 604 - DNA, 260 bp, Artificial Sequence
  Description of Artificial Sequence: Synthetic polynucleotide
cctcagaatgcggaagataaagatgaaccccacgaaaacccagaaactgatgctgaataaatacgcagacgccgcgcgttttacttacaacgcgtgtgtgagttctgtcaacgacaagacccacacggcaaataagtttactttgcgcaatgcgttcgtcacagcaaagaacaatccgttcttcgaggacaagaagtggattctcgtcactccaaaggtgatcagacagcaggcggtattcgaggttgccaagaatttca

SEQ ID NO: 605 - DNA, 260 bp, Artificial Sequence
  Description of Artificial Sequence: Synthetic polynucleotide
acccgtaataaaattaggaaggacactgttttggagaattatcccctttattgtccaaaatgcagacaagaaagtttatcgaacttagcaaactataagtttctaagagataaaacctataaaacttgtacggatattgtagggtaggaaaagaaatcttcctctatactaaaataaaccgaatgaaaagggggatcgaagtgaatattatcaagtcgtttaacaatacgattgattatcttgaaacagttcttgatgat

SEQ ID NO: 606 - DNA, 260 bp, Artificial Sequence
  Description of Artificial Sequence: Synthetic polynucleotide
aagcttgataagactcaaccaattgtgaggtttaaaaccaaagaagctgctgaaaggtttgctcagaaaattcttaagtctgctgaaaagttaaatgtctagttaggggtttgtaactgttcggtaatttctacctataactagacaaacctaacggaacgtccatataattaactcagtcaagtaaaggagttaattatatggaaaaccacgaagtgatgatttcaataggagatactgctaaagaacttggtgtttcg

SEQ ID NO: 607 - DNA, 260 bp, Artificial Sequence
  Description of Artificial Sequence: Synthetic polynucleotide
tttgattttatttatgatttaataaccttgagttttaaattacaaaaatttaaactttagttttagttgttttaaaagctttaaactttagtttagattgtttatatgttatgatattatattctataccatctatgaaatattataagaatatataaatatctataattatattataagttttcttaaaaaggatttaaatgtatagtattggagaattttctagaattataggtgttactaggacaaccttaagaaat

SEQ ID NO: 608 - DNA, 260 bp, Artificial Sequence
  Description of Artificial Sequence: Synthetic polynucleotide
aacgtttgttaggaatacttttagaaaaatagagagtactgatatcaatggcccccaaggtcattgattggttattattgtacggtgaattgatctttactaaaaaaaatatcaggacccctggtttttcagtaaaaaaatgttcaacaaataaaaaataactgttattctaatttcacacattcaacaggttattcataatgagtatttctactaattttccaggaatcatcactagtctaagcaaggcacttcctggt

SEQ ID NO: 609 - DNA, 260 bp, Artificial Sequence
  Description of Artificial Sequence: Synthetic polynucleotide
caaataatgaatgtatttgttgcgaaaatgaatggacaacgaaaatacaaaaaaaagtaaatcgttaaaaattcattttatttatagtatttatcataccacctacataaaaatcgacattatatttttctaataatatatgttattctttttttttctatttattgtatgaatatattgatataaaacaaatattatttgctttataaataaatgttaaaaattgaaataaaaaaaacaaaatttatcagcaacaacat

SEQ ID NO: 610 - DNA, 260 bp, Artificial Sequence
  Description of Artificial Sequence: Synthetic polynucleotide
tgccgacaagcgatcgctccccaagttagccgagcttgctggtataagccacacatactggcgggaagtggaagcagagacagttaagaacctacaagaacacacacttgccggaattgagaaggcgttaggtgtaaactttggagtggggtttggtaatgattagaaatatttatccatacttactcataactacttaaatgctatgctatagtagttatatgagtaagttatctatatctgaagcagcaaagttaaaa

SEQ ID NO: 611 - DNA, 260 bp, Artificial Sequence
  Description of Artificial Sequence: Synthetic polynucleotide
tacaagtttttctttttctgaattattaattttctgctaaaagtgttcaattaaagacctgcttttgtgaacaatagatatttcaaaaagataaaaaatagaaactagatatttcaatgaaaaatattgtgtaattgttcattttattattgatgccttttcgtgaacatgttataatttaattataatattgtggaagggtgttgattatgaaagtcttaggttattgtagatgttcaacaaatgaagaaaagcaggac

SEQ ID NO: 612 - DNA, 260 bp, Artificial Sequence
  Description of Artificial Sequence: Synthetic polynucleotide
ttctatattgtcataatcattaaatcctttattattaatagattttaaattaaaccaaccatcagtattaatattttttcgttttttatttttaaaccaatgataattttttatattcattaatataaaaaattatatatatttaaataagtttataaaaattgttatttatatataaagatataaagaattataatttaatggacgaatatctaggtggtaaagaagctagtaaaatattgggtgtacatcaaagaaca

SEQ ID NO: 613 - DNA, 260 bp, Artificial Sequence
  Description of Artificial Sequence: Synthetic polynucleotide
cataaaaatagaaaaatcgtagaggagttaagagacgttgctactaggattcaagactgagttaaaactaaataatcaacaacgctcattattagcccaacacgcaggaaccgcacgtcatgcttggaattggggtttggctttaaccaagcaaattttagaccataatcaagctaaccctgatgaaaaaattaagtttcctacggctattgaccttcacaaatggttggtagcattggtaaaatcagagcatgattggt

SEQ ID NO: 614 - DNA, 260 bp, Artificial Sequence
  Description of Artificial Sequence: Synthetic polynucleotide
ggcggtccggaaccgagggcgtgctcctcaacgagcgcaccgcacccgtcgcgatcgtccagtacgacaacctgcccgaacccacctgggccgactggaaagacatcgcgtgaccagttccggggggtttccgtttcgcgctggcccgcgccggctgcgggaggcgccggagtattgcctcgcgcgcgcgggtgtgtctggtggcgatcttgattgggggtggggcggtgagtgagggtcagttgttggggtatgcgcgg

SEQ ID NO: 615 - DNA, 260 bp, Artificial Sequence
  Description of Artificial Sequence: Synthetic polynucleotide
agtaattacaggtaaccataaattatcagatagttttttaacatttttcttgtaccattgacatattaaagtgtcagtgatatctgtatcttttgttgtatcagttgacgttgtatgaatatagtagtatataatcaagtctttaagtctatttataataaattatacttaaatataatagtatataatagtatatatcaatgaacgataaattaattcccagaagagaagtattagaaactttaaagatccattatcaa

SEQ ID NO: 616 - DNA, 260 bp, Artificial Sequence
  Description of Artificial Sequence: Synthetic polynucleotide
ttatatggtcaaaggtctaaaaaaactaagcgtttaattgaggaagtgaaaaaacaatgatagtagcaattaaaataaaattaaagccaactaaagaacaagagattttattttggaaatcggcaggagttgcaaggtggtcttataactattttttatcagaaagtgaaagacactaccaagagtatcttgaaggtaaacaagacaagaaaaccataaaagaaagcgaagtcagaaaatatattaataatgtattaaaa

SEQ ID NO: 617 - DNA, 260 bp, Artificial Sequence
  Description of Artificial Sequence: Synthetic polynucleotide
atgtcgccggaagggatttggcggcatgaaggttacgtgcagcgccgcgagaaggagaaatgagggtgttacaaaaacgaccgtttacgtaacacacttcagcgccacgcatctcggacctgttttgcgcggtttcgtgttacttttgctgttacttttcaatctgtaacttttgcccccttcattagctaacgtaacacatgcttgtcggttacgctcgcgtctccaccaaatcgcaaagtttgcagccccagattgac

SEQ ID NO: 618 - DNA, 260 bp, Artificial Sequence
  Description of Artificial Sequence: Synthetic polynucleotide
accacgtctcggacgtgactggggtcgaaaacatcctcgtccccgagcactcgatattcctggtcaacacacccgtgatctcactggatacgtggcaaggggagcgcctgcccccgcgccactgggctaccggcgacgtagcgtttctaccggccggatcagaaatcacatccaccccggatagaccctacggcagtgccatgatccgcgtgaacgacgaggcgttcaaaagggccacgagctgcgacctgcagtacgac

SEQ ID NO: 619 - DNA, 260 bp, Artificial Sequence
  Description of Artificial Sequence: Synthetic polynucleotide
taagcttgcataacttttttcgtaaacatattatattattattatgtttatgatgaaaaaaataatattataattatatttttgttcatattcatcattattgaaaattaatatttatgtataatcatgtataaaaagaatacaatgtgaaaaaattgcgcaaaaacatataaaaaaaaaagaatattgtaaattataacatgaaaaatattggaaactcttacaaaacgcgtaagaccgcttgtgaaatgcttgggata

SEQ ID NO: 620 - DNA, 260 bp, Artificial Sequence
  Description of Artificial Sequence: Synthetic polynucleotide
aaaagtattattatctactatttttgtaggataccatatttttttatttatttcttttattgtatcatcataccatggacacgtatctggattattctccatttataaatgtaattattagaattaacaaatctttaagtggttttataataatatataatgaaatataatataaacgaatggttacatatagtaatattatggataaatacatatcaagaaaagaagtattaagtgtactaaaaatacattatcatact

SEQ ID NO: 621 - DNA, 260 bp, Artificial Sequence
  Description of Artificial Sequence: Synthetic polynucleotide
atcttgtttacaacaaatgcatcaaaagaattctaaaaaatatgtttattggtaaagtatcaaattgtggtgtcgcaatataacatccagttggaaaacggttgatattgcgatatttcatgaatataatgattaataattatcagggtcgaaaaagtatataaaactatataaggatttgccttaattatatatatataatgaaatccaaagaggttttacaattattaggagtatctagagttactttatataaatac

SEQ ID NO: 622 - DNA, 260 bp, Artificial Sequence
  Description of Artificial Sequence: Synthetic polynucleotide
aatagagaatgagtttgatgcaataaaaactacaaaattcacaggcaaacaattcaattacgcccttttgcaagagtaatgacaatacttataagtacttttgattcatttaaaaaaattcactcgtattcataactgtacggtattgactacgatttgattatgtagtaaaatgaacatatagaaggtagtcataactaatggtcaaaagtaaggggtgtatttttatgatatttgggtattgtcgggtaagtagtaaa

SEQ ID NO: 623 - DNA, 260 bp, Artificial Sequence
  Description of Artificial Sequence: Synthetic polynucleotide
atatgatcactgctacaatttattgttgattggtaattattatttctttgatactgaacaatatcaaaccaagaatcagtctcaatactaatattattatcagataattttggtatccatttattttttttctttgtcattcattatttttcataaattgataaaactttatataaatatttatcaatattaaaaattaaatgagcaagtacataacaggaaaaaaagcaagtgaaatgctaaaagtacatcaacgtaca

SEQ ID NO: 624 - DNA, 260 bp, Artificial Sequence
  Description of Artificial Sequence: Synthetic polynucleotide
aatattcagccatgcgctatatgcgcggcaggcaccaatatttttggtgaaggtatcttttcctggaatatctgcaccgttctggtttttctgtaatgcgccagaagcctgatttaccgtttcctgtaaaccgaggttttagataatggttgtttccggcctgcatggcatgatttgcgcttttaaacgggagatccagagtgctgattggctatgtaagggtatcaacaaatgaccagaatacagacctgcaacgaaac

SEQ ID NO: 625 - DNA, 260 bp, Artificial Sequence
  Description of Artificial Sequence: Synthetic polynucleotide
gcggtcgtcgagctgccccagcctgacgggcccgacgacgacgggcaggtctacttcggtgcgtgccgtgacatccgcgtcgacaccaccgcaccgcacggacagttcccgcgcatctacgtcgaccacacgccgtatgccccagaaacgttgcgccgcgacgccgccgagatgctcgccgccgcactggaggccgagaagtgatcacctacacgtgcgactcatgcacggcgccgatcaccgggccggtacgtctcagc

SEQ ID NO: 626 - DNA, 260 bp, Artificial Sequence
  Description of Artificial Sequence: Synthetic polynucleotide
acctttgccagttccgggtattcttcagcagaaaaagccgccccgttgcatttcagccagcctgtcggcggagtggctgaaggccacggaacaggcacaccgacgggtaatgccgaaccttctcccaaaccaacgtttatgaaaatgcagagataacgggtaactggcatcatctccggtttttattcagggggatgctcatgcttattggctatgtacgcgtgtcaacaaatgaccagaacacggaattgcagcgtaac

SEQ ID NO: 627 - DNA, 260 bp, Artificial Sequence
  Description of Artificial Sequence: Synthetic polynucleotide
aaacgttatgacgtaggtcctaagcagtaccgccaactaaaattaatcaacgctatataactgaagtgtaatactatgtggtgagaataaatcgagcgtctgctcagatgtcgaatttgaacacctacaggtacttaccgcgaatcacggcagagatgcagatagccgtaagtctcaccacaaacttaccaacccccaattggttagttacagatcagtagatataaagcgcacgtccgttaatgaaaattgacggacac

SEQ ID NO: 628 - DNA, 260 bp, Artificial Sequence
  Description of Artificial Sequence: Synthetic polynucleotide
aaacgtgcaattaaacgccacgaagtaagcttacagacgagtctgctagatgccgcataattccgcccaacaacagggggcagggaatgggcgtagaagatcgcgattggtaccacgaccgtaaaaaacagaaaccaatcaatccagattggcagagagaatacaaccgatggtacggcaaaccgaacacgcccacgcccaagaagcccggcatgcactggacgctaacgctgatgtgctgggccacgttctttcttgcg

SEQ ID NO: 629 - DNA, 260 bp, Artificial Sequence
  Description of Artificial Sequence: Synthetic polynucleotide
aaacgtgcaattaagcgccaccaagaaagcgtgcaaccgagcttgctagacgccgcgtaacacgggagaggcatcatgggaattcacgatcgggattggtatcgcgacgcgatactcagacgcgaaacgagagaggcagcgcgagaaaaacgaacgctcaccgaacatcacgacagcccgccaaaaccgtccgctcactggaccgtgcgactcttgttctggatcgccatcttcctcatagcccacttagtcaacaaaca

SEQ ID NO: 630 - DNA, 260 bp, Artificial Sequence
  Description of Artificial Sequence: Synthetic polynucleotide
agacgtgcaattaagcgccaccaagagcgccagcagcccagcctactcgacgcagcataaccaccgctaaacgaacgccatgaagagcttcatcgcagtatcggcagcaaccgtatccatcgccgcgaacgcatataccgtcacgactacgacgacgaccacaacgcgctccgacgggactgtaaccacgcagacatcaaggaccgttccctacgatgccgcccgatgcgcgcgactaaccgtcgacctcagcatgctca

SEQ ID NO: 631 - DNA, 260 bp, Artificial Sequence
  Description of Artificial Sequence: Synthetic polynucleotide
tgtagcattagtaataccataaatgagtcccgaatcccagaactagataagattactaaaaataataaaatgtgggataagtggaattcaatttcgaatagtaataaggaggtacttaacagtaactgaatatctataaaaatttgacaaattctgtaaaatattatataatgttgctatattatatatgaggtgataaaatgaaaccagcagaattttcaaatagaataggcgtatcagagcaaactcttcgtaactgg

SEQ ID NO: 632 - DNA, 260 bp, Artificial Sequence
  Description of Artificial Sequence: Synthetic polynucleotide
aatattcagccatgcgctatatgcgcggcaggccccaatatttttggtgaaggtatcttttcccggaatatctgcgccgttctggtttttctgtaatgcgccagaagcctgatttaccgtttcctgtaaaccgaggttttagataatggccgtttctgacctgcatggcatgatttacgcttttggacgggagattcagcgtgctgattggctatgtaagggtatcaacaaatgaccagaatacagacctgcaacgaaac

SEQ ID NO: 633 - DNA, 260 bp, Artificial Sequence
  Description of Artificial Sequence: Synthetic polynucleotide
atgcatagttacattaatttattaatgcatttttttttatttttaatggtgggtcgattcagttggttttcggagaaggagaactgtgaactgacgccgtatcaaaagtatcctttttaatattttatgaaagatagtctcaaaagtattgttttcttacttttgattcattattatcaatttatcttaaggctattgagatgatagtgatggcaaaagtaggttacaggagagtgtccagtcgagatcagcatctggac

SEQ ID NO: 634 - DNA, 260 bp, Artificial Sequence
  Description of Artificial Sequence: Synthetic polynucleotide
gtattacaaataatgaatgtatttacagcaaaaatgaatggattaagaaaatataaataattataaaattttatatagttataaagttttataaagaaagaatttactagtagatgcccagtctaataatttatttatctagtaaatttagaaagatgtcaaagattattccaaaaaaattagccatttattatgggtacccaagttcagtgaatgccacatatactgttagtggtgcggctgctgttttttcagcatac

SEQ ID NO: 635 - DNA, 260 bp, Artificial Sequence
  Description of Artificial Sequence: Synthetic polynucleotide
ggaatgaggagtcacaaatacgaaaaggtgaagaagtgtgttgaagaacttaaggcttaataactttcaaccacaagaggaatacgtttacctaacgtactctctgaagaataataagaaggaggagacgaaaatactactggagaattacagagtcctattgcagaaagctctagactggttatgggagaggactaagatagagaggaaggaagtaaagaaaggtaagaaagtcctaacgaagattaagataaccctgc

SEQ ID NO: 636 - DNA, 260 bp, Artificial Sequence
  Description of Artificial Sequence: Synthetic polynucleotide
ggtatgaggagccataaatatgagaaggtgaagaagtgtgtcgaagagcttaaggcttaaatcattccaaccggaggaggaatacgtttacctaacgtactctctgaagaacgataagaaggtgaagagcaggatattactagagaactataaacacctactacagaaggctttagactggttatgggagaggactaagatagagaggaaggaggtcaagaagggcaagaaaattttcgctaaggttaaagtaaccttgc

SEQ ID NO: 637 - DNA, 260 bp, Artificial Sequence
  Description of Artificial Sequence: Synthetic polynucleotide
aatattcagccatgcgctatatgcgcgacaggccccaatatttttggtgaaggtatcttttcctggaatatctgcgccgttctggttttgctgtaatgcgccagaagcctgatttaccgtttcctgtaaaccgaggttttggataatggtcgattttggcacgcatggcatgattggcgcttttaaacaggagatccagagtgctgattggctatgtaagggtatcaacaaatgaccagaatacagacctgcaacgaaac

SEQ ID NO: 638 - DNA, 260 bp, Artificial Sequence
  Description of Artificial Sequence: Synthetic polynucleotide
gtaatggtagtcgatgttaccgcgccgatagttctcgcaaattgttttttgtccggaatatcgccgccattctgcgatttttgcagtgcacccgcagcgagatttatcgtttctcctaaaccaaggtttttgcgaattgcctccgtgtcgtctgaacgatattttttcccgcttttagcaacaatcgctggtgataaagtatgcaatatggttatgcgagagtgtcaacttttgaccaaaatttagaattacaactggag

SEQ ID NO: 639 - DNA, 260 bp, Artificial Sequence
  Description of Artificial Sequence: Synthetic polynucleotide
tcagttacatttactttgaataagaatggaataagaggtggaattatagatgagaactaatgaacataacttccataatatagaagaagaaatcaaacatgttgctgtatatttaagattatctaggggagaagatgaaagtgagttagataaccataaaactagattattaaatagatgtgaattaaataattggagctatgagttatataaagaaattggttcaggttcaactattgatgatcgtccagtaatgcaaa

SEQ ID NO: 640 - DNA, 260 bp, Artificial Sequence
  Description of Artificial Sequence: Synthetic polynucleotide
tcgcttaacttgtgtttgacaataattattcagaatgaaaacaaaaataaaaataagtgagatagattccattcgaaatcatttaaaactatattaacgactagtacgataaattttctcatggctgcttaataataattagatccaaagcttaatataaaaaacacccaccggaaaataatccagtgggtgttttcaatagagatgtttattcaatggacggatacctcattactagtacccaaagatgttataagcac

SEQ ID NO: 641 - DNA, 260 bp, Artificial Sequence
  Description of Artificial Sequence: Synthetic polynucleotide
aatgtatatgtagccaaaataaatggaaaaagaagtggtaaattaaaagcgaaaaagtaattacattaacaataaaatatatgaaaatacatacattttcatatattttaacgatccgtaataatttgttaagtatttttgacaatgtatattgattaatgtacattgtcaaatcatattacttttgttttcggttatcactaattgcgttcttgactttggaaatgatttcaataaccaatcgacaacatccactagca

SEQ ID NO: 642 - DNA, 260 bp, Artificial Sequence
  Description of Artificial Sequence: Synthetic polynucleotide
aatgtatatgtagcaaaaataaatggaaaaaaaagtggtaaattaaaagcgaaaaaatgattacattaataataaaatatatgaaaatacatacattttcatatattttaatgaaccgtattaattgatcgatcgagtagcttgtttgagaaagtcattaaaattccctatagtaattttcatctttgcaaacaaattgtcactgaattagaattttacaacataaattatcctcacaacttttttgaattcggtaacaa

SEQ ID NO: 643 - DNA, 260 bp, Artificial Sequence
  Description of Artificial Sequence: Synthetic polynucleotide
gtttatgattaacagctaaactaggtttccaaagtaaatcagaaaccttttcacattcgtcattccaaaacttaccatttgtagttttggccattacattattactaatattatgaaattatcttatatttaagtaactttttgactattatattaattgaacatatttaaagatatgtttcgaaaatatatttatcagaatgcctaaatatgttcgtcgtaaagaagtacttgaagtattaaaagttcattatcaaact

SEQ ID NO: 644 - DNA, 260 bp, Artificial Sequence
  Description of Artificial Sequence: Synthetic polynucleotide
gcaattaaaagacgaagatttcaactttaacttttaatcattaaacctacttggactttaattcaagtaggtttaattttctttaatttttgtaaataaaaatattaattttaaatataattttaatgtaattacttattaatttctgagaaagaaaattaacagtttatataaaggataaaaaggagtttttatttgcaatgagaaaaagatggaataaagaagaagataaagagttactatcatatattttaaaattc

SEQ ID NO: 645 - DNA, 260 bp, Artificial Sequence
  Description of Artificial Sequence: Synthetic polynucleotide
aatgtctatgtagcaaaaataaatggaaaaagaagtggtaaattaaaagcgaaaaaatgattatattaataataaaatatatgaaaatacatacattttcatatattttaatgaaccgtaatatcagcaccttgacttaccaagtatttaaccatttcaagatgcccattttcacaagcttttctaacagctatgttatcacgttctttaatattagctcctaaaattattagatatttgactatttcgattagtccata

SEQ ID NO: 646 - DNA, 260 bp, Artificial Sequence
  Description of Artificial Sequence: Synthetic polynucleotide
ggtttatgattaatgattaaattaggtttccaaaataaatcagaaatcttttcacattcatcattccaaaatttaccatttgtagttttagccattacattattattaattttatgaaattatcatatatttaagtaacttttgactattgcattaattgaacatatttaaagatatgtttataaaatatctttatcagaatgcctaaatatgttcgtcgtaaagaagtactcgaagtattaaaagtccattatcaaact

SEQ ID NO: 647 - DNA, 260 bp, Artificial Sequence
  Description of Artificial Sequence: Synthetic polynucleotide
cttcttgacaaaaacctttttcttagttttacttccagtaataatcctctttttagcgggaacttttggtttgacatttttaactgcctctttcatgattattttatgattatttatgaataatatttctttatattaattttgataaatacatataaaatgatattaactaaaatatcaatattaataaaataataacaatgagtaaatacatgggcgggaaagaagctagttctgttcttggtgttcatcaaagaacg

SEQ ID NO: 648 - DNA, 260 bp, Artificial Sequence
  Description of Artificial Sequence: Synthetic polynucleotide
cttcttgacaaaaacctttttcttagttttacttccagtaataatcctctttttagcgggaacttttggtttgacatttttaactgcctctttcatgattattttatgattatttatgaataatatttctttatattaattttgataaatacatataaaatgatattaactaaaatatcaatattaataaaataataacaatgagtaaatatatgggtggtaaagaagccagttctgttcttggtgttcatcaaagaaca

SEQ ID NO: 649 - DNA, 260 bp, Artificial Sequence
  Description of Artificial Sequence: Synthetic polynucleotide
gacaaaaacctttttcttagttttactaccagtaacaatccgctttttagcgggaacttttggtttgacagttttaactgcctctttcatgattattttatgattatttatgaataatatttctttatattaattttgataaatacatataaaatgatattaactaaaatatcaatatcaatattaataaaataataacaatgagtaaatacatgggcgggaaagaagctagttctgttcttggtgttcatcaaagaacg

SEQ ID NO: 650 - DNA, 260 bp, Artificial Sequence
  Description of Artificial Sequence: Synthetic polynucleotide
aactataaaattcacaggcaaacaattcaattacgcccttttacaagagtaatgacaatatttataagtacttttgattcatttaaaaaaattcactcgtattcataactgtacggtattgactacgatttaattatgtagtaaaatgaacatatagaaagtagtcataactaatggtcaaaagtaaggggtgtatttttatgatatttgggtattgtcgggtaagtagtaaagtacaaattgataataatagtttagaa

SEQ ID NO: 651 - DNA, 260 bp, Artificial Sequence
  Description of Artificial Sequence: Synthetic polynucleotide
tatttggattatcacatttaaaatatttttttttgttttgttttaaattaattgttttggaaggaatccataatgatttggataatttggtacattcattattccaaaacattacatattataaattgtatttataaacatatctttaaatactttttaataatattttatataaaaattatttataagtatgtataataatgacaaaatatgtaagaagaaaagaagtattggatgttttaaaagtacattatcaaaca

SEQ ID NO: 652 - DNA, 260 bp, Artificial Sequence
  Description of Artificial Sequence: Synthetic polynucleotide
ggttgcatcgcgcatgtcaatctaggctataccctaacttgatgtcaggcagggccgcgccgcttcgtcagaatagagtctgctttcccattttttgacacatgcccgcgaaggttatagatttcagcctgacagaaatgggctttgaggcacaacggaacagaaagtgcacttaagccgccttcaaccaaggagacatcgtgcaggggcaccgcatcggctacgtccgggtcagcagctttgaccagaacccggaacgc

SEQ ID NO: 653 - DNA, 260 bp, Artificial Sequence
  Description of Artificial Sequence: Synthetic polynucleotide
gctcgtgaattcggaatcagtcgcgaaaccctgtatcaatacttgagaacggatcagtaaatatgccacgtcgttccatcctgtccgccgccgagcgggaaagcctgctggcgttgccggactccaaggacgacctgatccgacattacacattcaacgataccgacctctcgatcatccgacagcggcgcgggccagccaatcggctgggcttcgcggtgcagctctgttacctgcgctttcccggcgtcatcctgggc

SEQ ID NO: 654 - DNA, 260 bp, Artificial Sequence
  Description of Artificial Sequence: Synthetic polynucleotide
tttcacaaaccccattcagaaacgaatgcaccccgccaaggatggagaggagcattattgtgaaatcacacataactatttccttaatagtgaattaaatatcattgggaaacggtatgtactttgtgatttccacacatactggtttttgttaattaaaatccgcagcttgctataaataacgatagtgagcagaaaatatgctaataggctatgtacgcgtatcaacaaatgaacaaaacactgctttacaacgaaac

SEQ ID NO: 655 - DNA, 260 bp, Artificial Sequence
  Description of Artificial Sequence: Synthetic polynucleotide
tataagctccacgcctaactccagtaagaaataaataggttccactaataatggacattaaaaaaatcaaaatctgcataagctcctcccggatctaacaaaaatcaagcaggaacctattcagattgttatttctgtgcataacgctttgttctttaaaattcgcagactcataagaacaacgcattagagtaaaaatcatgctgatcggctatgtacgcgtatcaacaaatgaacaaaacactgctttgcaacgaaat

SEQ ID NO: 656 - DNA, 260 bp, Artificial Sequence
  Description of Artificial Sequence: Synthetic polynucleotide
aattatcttttttatctctaattattggtattttgtttctttaatgttgtaaaaataaagtacgctttaaatttacgtttgcgttttaaaataaaattgtaaaaatagaattataaaattaattattttacaaaatgtaaataaaattattgattttaattttacaattagttataatatagtcaaggagtgattatattatgaatatagcttatgtaagagttagtacagtagaacaaaatgaagaaagacaattagaa

SEQ ID NO: 657 - DNA, 260 bp, Artificial Sequence
  Description of Artificial Sequence: Synthetic polynucleotide
gctaaaagaaaaacagaaaaaatcattaaagaaataacggaggaaaaagaagatgagtaggattataggaacttacctatatccgtcatatgctaatagaggaaaaatagaaaagataaatagcgttctaatagagtatagaaaaaccgctaaacaaatagcaaaattacaatggaaacatttctttaaaggtggtgagtttagcaagtatttgaacgttagggaagtgaaatcaaggctatcaaaaagatatatacaaa

SEQ ID NO: 658 - DNA, 260 bp, Artificial Sequence
  Description of Artificial Sequence: Synthetic polynucleotide
ttcatgtacttgtgtgactccgtatttaatgtccaccggcataccgagggctgtcagctgctgccggatttatgtccgtttatatccatttgtatccgtttgtgtcatttatttatatcgtcacaaagaatacaaaatcacgaggtgcgttaaaatcccagaaataaaatatcctcttgtgttatgaagtaacgtatgggatgttcgcaacccttagagacgccaagaaacattatcagtgcaaccataagaccatctgg

SEQ ID NO: 659 - DNA, 260 bp, Artificial Sequence
  Description of Artificial Sequence: Synthetic polynucleotide
atgcgcccgtctctaactccgagaaggaatacgccggttccacttagtagggatgttatgactactacagccagattttcataatctgcaaacatacccctccagaaataacatctaatgcgccactaacttagtcagtttgttatttccttacaggacatcttctagaatctccccccttaacatacaaggggggacatatgcttattggatacattcgcgtatcaactaatgaccaaaacaccgctttacaacgaaac

SEQ ID NO: 660 - DNA, 260 bp, Artificial Sequence
  Description of Artificial Sequence: Synthetic polynucleotide
atttatggcgtgggagtgtcgacgatttaccgatatttccctgcctcaaaaaagtcatgatgatggcttaaaatcttcacaatatcatcatgatatcgtctctatttatatgatttgtatgagggtggtatatccatcttattgtgaatatagctattaactaattgatatttatataataagcaatgaatttaaaatccctcggccgcaaggctgtgcgggttcaagtcccgctctgggcaccatataagaattcattg

SEQ ID NO: 661 - DNA, 260 bp, Artificial Sequence
  Description of Artificial Sequence: Synthetic polynucleotide
ttacaagtaatgaatgtctttgtagcaaaaatgaatggtatgagaaaatataaaaattaaaattatttataatttatataattaattttaatataaaaagtgtcaaaaaatatcaagaaattgatctactagttcctgcccttcataatcctccttttttcaattttttttttataaaaaattgaaaagttaattaataaacaagtttattttattatttccatattattcacggaggaccattttcccatatctttttt

SEQ ID NO: 662 - DNA, 260 bp, Artificial Sequence
  Description of Artificial Sequence: Synthetic polynucleotide
tttcagtctgctcagtggtcagaaagtcaacgggcatatcggcctccctgcctgacgggcatttagtaacatttttccaaccgtacgaaatgttataaattatcggacatcgtaaaactgttacattaatatgtctattaaatcgtaaatttgtaataatagacatgagttgtccgatattcgatttaaggtacatttttatgcgactttttggttacgctcgggtctcaaccagtcagcagtctcttgatcttcaggtc

SEQ ID NO: 663 - DNA, 260 bp, Artificial Sequence
  Description of Artificial Sequence: Synthetic polynucleotide
ctttttgatgttagcatttccactctttacaagaaattccctgtaaatcagtcgcgttgaaagtggcgatattgtaccagcactgacacatcgtgaaatacgtgcgccgcacgcctggcaaccagaacataaggtatccctgtcaaccggagagactgccttatggctcaggattaccaccacggggtgcgcgttgttgaaatcaacgagggcacccgacctattaccacggtgagcactgccatcgtgggcatggtctg

SEQ ID NO: 664 - DNA, 260 bp, Artificial Sequence
  Description of Artificial Sequence: Synthetic polynucleotide
ttaaaaaaactaccattttatagatatttgatgtaaaaataaagcatggtgtaaatttacattgtaaaatatctattttgatgtaaaaataaaattaaaaacgtaattaatttacaaaaagaaggataagtctttgactctaattttacatttatgctataatattatttatagagtaaacataggtggagggatcaaagatggtagtaggttatatgagagtttcaacagcagaacaaaatgaagatagacaattagtt

SEQ ID NO: 665 - DNA, 260 bp, Artificial Sequence
  Description of Artificial Sequence: Synthetic polynucleotide
tctatcatgcatttattttctacaaaagaatattctaggagaaaaaacaaaaaaatataattgaggcgaaaaaattaaaaaaaatttaattgcggcgaaaaaattaaaaaaaatataattgcggcgaaaaaattaaaaaaaatataattgcgtttaaaaactatataaagatatataaataatatttatattatggatgattctgaaatatcaattgaagatactgttaaaaagaaaacattttcaatacaattgaacaa

SEQ ID NO: 666 - DNA, 260 bp, Artificial Sequence
  Description of Artificial Sequence: Synthetic polynucleotide
tctattatgcatttattttctacaaaagaatattctaggagaaaaaacaaaaaaatataattgcggcgaaaaaattataaaaaatataatcgcgttcaaaaactatataaagatatataaataatatttatattatggatgattcagaaatatcaattgaagatactgttaaaaagaaaacattttcaatacaattgaacaaaaaatcatatattaataatatttttaaacatctatcatcgatcactaagaatattttt

SEQ ID NO: 667 - DNA, 260 bp, Artificial Sequence
  Description of Artificial Sequence: Synthetic polynucleotide
tccgacagcatcggcggaaatggccccaacatctgacgcccataaagtgatatcaccggtcagtggtttactgttaacccgccgtgtcgccgggacggcattttttgccagatttatcgtttcgcctaaaccgagatttatgaaaatgcagaaaacggtcgtaaatggcatgatcccagccttttgcgagggggcctgttgtgcaaattggctatgtacgggtgtcaacaaatgaccagaacaccgatttacagcgaaac

SEQ ID NO: 668 - DNA, 260 bp, Artificial Sequence
  Description of Artificial Sequence: Synthetic polynucleotide
atgtgtcatcaaacgctgcctgctcgctatccgttgtattcaaataattcagatcgttaaggaaaatgttgtctcacaccccccagtgcgtctcgatccagaaaattacatacacgactaaattaccaacatgctggctgcaatttggtctgatttagacaaactgaaactagaagaagaagaatgcaaagaaaacgtaaagccagtacaacaaaacagcttggtgaagaatttttgcgtcgaatgctgcggggtcaagg

SEQ ID NO: 669 - DNA, 260 bp, Artificial Sequence
  Description of Artificial Sequence: Synthetic polynucleotide
ggtcgttaaccgttccggccggaccgttaaccagctcgtcagcgcgcttgacgttatccaggaaaatttcaggcgaagttgttcccaaaggcgggttaagttcggccatgttttttgctccaaaaagaggcttcgcccaaacgagggtttgagcgaatggccgcagctttttacaatcagctatttcaacgggttacaacatgctgattggctatgcacgggtctctacaggggatcaaaacctcgatttacagaaaaac

SEQ ID NO: 670 - DNA, 260 bp, Artificial Sequence
  Description of Artificial Sequence: Synthetic polynucleotide
tctcatttgcatcagtgacggctgatgcgttcaaataggtggaaccaataccaaaagcccctacctgaattacgttccccgctaaagaacctacgtccctgatagcactacttcccaaaccgacattttatagattgctcttgagtagcctggccgataacttcacctgatttttttgcagaattaactgggtgaaaaatatgcaaattggctatgtaagggtgtcaacaaatgaccaaaatacagatctccagcgccaa

SEQ ID NO: 671 - DNA, 260 bp, Artificial Sequence
  Description of Artificial Sequence: Synthetic polynucleotide
cagccggacttcgccgataagacgacaaacgaaagcgagaaccggtactggatcctgcgtaacatggggagggttctgaggagttatcttgcgatgcgctataggtttgccccatccctcccaaaccaaccttttttataaccatcaaaaatctggtgatgcttcgccgtttctcctgttttcataacaggagaaatcccatgatttacggttatgcccgagtatcaacaaaccaccaggacactgaattgcaactaacg

SEQ ID NO: 672 - DNA, 260 bp, Artificial Sequence
  Description of Artificial Sequence: Synthetic polynucleotide
ctcgaccatattgcaggattttaccgttgggtaatttcatccatccatcaccactggcaaaaaaagccatatccggtatctgattttcccctgttcccacatcccgttttgccgcttctcccaaaccaacctttcaaatatttttctgaatcaggtgatatttcgcctcttctcctgtttttacaacaggagaagcactcatgatttacggttatgcccgagtatcaacaaaccaccaggacactgaattgcaactaacg

SEQ ID NO: 673 - DNA, 260 bp, Artificial Sequence
  Description of Artificial Sequence: Synthetic polynucleotide
ggacttcccggcctcgtgtcgttcgttgtggagacgatagaaaccctcgccgaaccgccgacccagaacgaactggcaaagcgtgaagtagagacagcggccaaggttgccgcaatcaacgaggccacccagcgcctcagagcagcccaagcacgggcacaggcagagcagatcgccaacaacagaagagtgagagagatatgattttcggatacgcaagagtgagcaccaatgaccaagatcatcagctccagctggac

SEQ ID NO: 674 - DNA, 260 bp, Artificial Sequence
  Description of Artificial Sequence: Synthetic polynucleotide
cgctggatagcaaaccagaaggttgcccagcaagaggccatgggtaggtggaatgccaaagagcaggccatcaaggacgcaacagcagcaaacgccgcccgctgggaagagcccaagccggaaccggtaacacatcaatcacccgcccgcatgggcatgacagcaatcaccaccaaccccaagaacaggaaacgccttagatgatattcggatacgcaagagtgagcaccgccgaccagaatcaccagcttcaactggac

SEQ ID NO: 675 - DNA, 260 bp, Artificial Sequence
  Description of Artificial Sequence: Synthetic polynucleotide
aagctcctgttccgggctccggttgtggtggttgcttgggcgatagagcgccacgggtatgcagctgaagagcgggaatatgcacccattcgagcacggcgaaacaaggcggcggatgccgccctgagagccgccattaaccgggctaacgcattcatcgaacaatacgacgccgagaaggcaaagagagaggtagagcaatgatttttggatacgcccgagtcagcaccgctgaacaagataacgccatgcagatgacc

SEQ ID NO: 676 - DNA, 260 bp, Artificial Sequence
  Description of Artificial Sequence: Synthetic polynucleotide
gggtttcccggcctcgtgtcgttcgtggtggagacgatagccaccctctcggagccaccgacccagcaccagctggcagagagggccaagcaaagggccaatcaggccatcgcaatcaccgaggccacccagcgcctcaaggccgcccaagcgcggacactggccgagcaggccgccaacaacagaagggttagagagatatgattttcggatacgcaagagtaagcactaatgaccaagatcatcagctccagcttgat

SEQ ID NO: 677 - DNA, 260 bp, Artificial Sequence
  Description of Artificial Sequence: Synthetic polynucleotide
ggattacccggccttgtatcgttcgtggttgagacgactgccacccttgcggagccaccaaccaagcgggagctggcggcaagagccaagcagaaggtcgagcaggccaccgcaatcaccgaggccacccagcgcctcaaagccgcccagtcacgggtgatggtcgagcaggccgccaacaacagaagagtgagggagatatgattttcggatatgcaagagtgagtaccgctgaccagaaccaccaacttcaactagat

SEQ ID NO: 678 - DNA, 260 bp, Artificial Sequence
  Description of Artificial Sequence: Synthetic polynucleotide
gtagcaacccaaatgggtgtcagccgcgctaccctttatcgcaatttggagaccgtataatgttcgacatcaacctgaccaaggccgccatcgtccaagtggaagaggctcaagccctcaactcccagttggcccgcctcatgtatgacgttgctgatggccgtggttacatgatcatgcagggagccacaaccgtgagtgtggttgcccgccagcaaggtgagaccagagttgtgaaggtctatcccgtctccttcctc

SEQ ID NO: 679 - DNA, 260 bp, Artificial Sequence
  Description of Artificial Sequence: Synthetic polynucleotide
atcacagtgattttagaaccacatttattatataatggaaatgaatctactggttcttatacgacgggtattgacaaaattgataaaataattgagcagagaattggtcaagattatactgctcaaaaaaatctattcaaaacaaacaccaattcttttttatataattgatataaacattcattataatactattattaatgtcgtatgtcaattctaaagaagcacaagccttcttcaaagtctcggatcaaactctc

SEQ ID NO: 680 - DNA, 260 bp, Artificial Sequence
  Description of Artificial Sequence: Synthetic polynucleotide
acagtcttcacagcaaaatatcacggaaaaagaaaatataatttgcacaaggaagattagaatatttccatgcgttgaacatataaatttctttaataaatgttttggagccacaagatatatttataataaaacacttgatgcaataaaaaaaatgtataaaaaaaattcaaaaattcttcgaacaaaagccaaaaaaggatgtattcacgttgtatcaaaaaataagtcaagtagtaaaactacaaaaaataaaagtc

SEQ ID NO: 681 - DNA, 260 bp, Artificial Sequence
  Description of Artificial Sequence: Synthetic polynucleotide
aggatgttaaatcaaattgaatacagtgtttgcctgatgatgttgaatcagttgttggaagcgaagcagatcacgaaaaaagaatatgacaaagttaaaattaccttaatgaaggagtatcaaatatcttctgaaatattaagtggataagtgaaaagagttcgggtagtatgtgtgctaagaaagaggtggtgagatatatggctaaagtagaaatcattaaagccaataaagaactgtcgaatcgcaataagaaaggt

SEQ ID NO: 682 - DNA, 260 bp, Artificial Sequence
  Description of Artificial Sequence: Synthetic polynucleotide
tcaattatcacagtcttcacagcaaaataccacggaaaaagaaaatataatttgcactagaaagattagaatatttccatgtacagaacatataaatttctttaataaatgttttggagccacaagatatatttataataaaacacttgatgcaataaaaaaaatgtataaaaagaattcaaaaattcttcgaacaaaagctaaaaaaggatgtattcatcaaatatctaaaaataaatcaggtagtaaaactactaaaa

SEQ ID NO: 683 - DNA, 260 bp, Artificial Sequence
  Description of Artificial Sequence: Synthetic polynucleotide
gttgaaactgttacattacctataaagaatcaagtagataatgaagagtgggttgattaaacattaatgccgttcgcacggcattttttgtatggtaaaatgtatattcgtattacatttggtgatactaattgtaacggaaggagcgtgcgacatgacagtcatcgcagaccaactaaaggtaggcgactatatatttattgatagtccacatgtacctgattttatgaatagaagatgggttgaaattgaaggattta

SEQ ID NO: 684 - DNA, 260 bp, Artificial Sequence
  Description of Artificial Sequence: Synthetic polynucleotide
ccggacgcgggcccgcccgcgcgcgaggcgatcccgcttgcaccgttatcgatctgtgacctactgtggggggcgtctccggcgtgcccggagaaccccagaccacaccccgcgagccgacaccgccgcggaaccccgacgccccgccggcccccacccggcggggcgtccgcatgtccccggcgaggaggtgaccgccgatggcacgccccatcacggacgccgaccgccgacaggtgcgcgagctgcacgccgcgggg

SEQ ID NO: 685 - DNA, 260 bp, Artificial Sequence
  Description of Artificial Sequence: Synthetic polynucleotide
gcgggcccgcccgtgcgcgcgaggcgatcacgcttgcgccgttatcgatccgtgacctaatgtgggggccgtccccggcgtgcccggagataacgagaccaccccccgcgccccgcgtccgacacccgcaggagcgccgacgccccgccgaccccacccggcggggcgttcgcatgtccccggcgaggaggtgaccgccgatggcacgccccatcacggacgccgaccgccgcaaggtgcgcgagctgcacgccgcgggg

SEQ ID NO: 686 - DNA, 260 bp, Artificial Sequence
  Description of Artificial Sequence: Synthetic polynucleotide
gcggacccgcccgtgcgcgcgaggcgatcacgcttgcgtcgttatcgatccgtgatctaatgtgggggccgtccccggcgtgcccggagataacgagaccaccccccgcgccccgcgtccgacacccgcaggagcgccgacgccccgccgaccccacccggcggggcgttcgcatgtccccggcgaggaggtgaccgccgatggcacgccccatcacggacgccgaccgccgacaggtgcgcgaactgcacgccgcgggg

SEQ ID NO: 687 - DNA, 260 bp, Artificial Sequence
  Description of Artificial Sequence: Synthetic polynucleotide
cgtaggcgcgcgcgccctcgaacggacttgcgccgttatcaatccgtgacctaatgttggggccgtctccggcgtgcccggaactccccagaccgcgcccccgcgagcgactaccgcacccgggggcgccgacaacccgaacgccccgtcggcccacccccggcggggcgttcgcatgctcggcgaggaggtgttcgccgatggctcgccccatcacggccgccgaccgccgcaaggtgcgcgagctgcacgccgccggc

SEQ ID NO: 688 - DNA, 260 bp, Artificial Sequence
  Description of Artificial Sequence: Synthetic polynucleotide
aaagctcacgtggcttgctttacccatctagtacaagttatctattatagaaaagtctaaataggtaagtttgagtaagttttatgtaacggctgagacaatagcggatcttggatcgatccaaatagacagaacagtagaagaaactgctgaaataaaggaattaaggcaacaaataagcaaattggtaggtttaggcgataatgatctaaacgaaataattcaaataaaacagacaaaattaaataacctgctgaacg

SEQ ID NO: 689 - DNA, 260 bp, Artificial Sequence
  Description of Artificial Sequence: Synthetic polynucleotide
ggtcgtagttggagactggcaccttcgatgtgaggtagattgtgcgatacaacagataatttacttcccatatgtgctctgcgaatgatgtaatgtctgacaataatccctaaagtttgataggatcaattttttagcgaaaaattgaatatggaatgttgtgtaggtcttagtaagtgagtggatttgaaaccacacacatggcgggaactgttgttgatccaaacgagaataaaatattgctacagtggcttgaagcg

SEQ ID NO: 690 - DNA, 75 bp, Artificial Sequence
  Description of Artificial Sequence: Synthetic oligonucleotide
ttcatacccgttgacatggcagacgacatttgtgggcatgaaaccgccagtggcgaaccatgccaaaaccccgct

SEQ ID NO: 691 - DNA, 260 bp, Artificial Sequence
  Description of Artificial Sequence: Synthetic polynucleotide
ggcggggacaacgtcgactccctcgcgcagcagcggttcagcaccagcagccacgaggtaaccgccgtcgaggccaaggcgatcaacgccaccctcggcgcgacgttctgcaagaccgcctaacgcccgacctcgacggcccggccccgcaccagggcgccgggccgtcgccatgtccgccctcggcgaggaggtgagccgtggccgcccgacccatcaccgacacagaccgggagcaggtcaaggccctccacgccgag

SEQ ID NO: 692 - DNA, 60 bp, Artificial Sequence
  Description of Artificial Sequence: Synthetic oligonucleotide
atggcgcgaaagagcttgtatgaaaaattggacatagaaacacggttgcccgaaattgaa

SEQ ID NO: 693 - DNA, 260 bp, Artificial Sequence
  Description of Artificial Sequence: Synthetic polynucleotide
acgcctgtgacaaccgggttgttacggacccgattgagcgattttcgaccattggcatgatttcgatataggcgagtttaatttatagtggcatgacgtagctcgtgggctttagcttgtcggcagcgagtttatacgtgcagtagtcctgagcttctcgttttgctgtcattacatcttcccatgtggggtagatgcggccggaacggatcttttcagcaaaatcgtagacgatcattcgatcgttcacatctttcttc

SEQ ID NO: 694 - DNA, 260 bp, Artificial Sequence
  Description of Artificial Sequence: Synthetic polynucleotide
aacattaaaaataaaaaatgtcatcgaaatattacagatgaattagataaagattattaaaaaggagaaattataatggcaaacgaaattaaagatttacaagtgtatttaggtggagacttattatcaacccctatggtagaatatcgaaacaaacaaagagacgaattagatggtattattggaattaaagcatactctccatcagacgataagtctatcaatgataaaacgactgcgatacaagaaggtctggcaga

SEQ ID NO: 695 - DNA, 260 bp, Artificial Sequence
  Description of Artificial Sequence: Synthetic polynucleotide
atatgatcactgctacaatttattgttgattggtaattattatttctttgatactgaacaatatcaaaccaagaatcagtctcaatactaatattattatcagataattttggtatccatttattttttttctttgtcattcattatttttcataaattgataaaactttatataaatatttatcaatattaaaaattaaatgagcaagtacataacaggaaaaaaagcaagtgaaatgctaaaagtacatcaacgaaca

SEQ ID NO: 696 - DNA, 260 bp, Artificial Sequence
  Description of Artificial Sequence: Synthetic polynucleotide
gcaggattttcccgttgggtaatttcatccatccatcaccactggcaaaagaggccatgtccggtatctgattttcccctgtccccacattccgttttgccgcttctcccaaaccaaggtatgcgagaagacccgtttatgaaaatgcagagataacgggtaactggcatcatctccggtttttattcagggggatgctcatgcttattggctatgtacgcgtgtcaacaaatgaccagaacacggatttgcaacgtaac

SEQ ID NO: 697 - DNA, 260 bp, Artificial Sequence
  Description of Artificial Sequence: Synthetic polynucleotide
ctaaacgtggacataggcactatggatatacgcacagactgggactcagattcaggatgggattgggagacaattccagatgaagtgatagtttgtaagaaatgtttagaacacctcattgaagcaaaaacaatgagtgagcagtaagccaaaggcttaacggacgtatctttttctttttgcgggtcgtattgctggtaatgactgatatttgtggcgtagagacaactaaaggtgagccatgtcagaatcctgttgag

SEQ ID NO: 698 - DNA, 260 bp, Artificial Sequence
  Description of Artificial Sequence: Synthetic polynucleotide
gttggcaatagtacgatttctagaattaaacataacgtttcgtggtcagctactaagtaaaaaaaagccccctatatttctagggggctactagtgttttctaacctgctactactatttcgactcgttatagagtgctactaacttatatcgagatatgcctagacgttctaatgcatattctaatagttcactatcttcataatcttcttttctacaatagtcacagctagaatcctgctcccatgtttcccccggag

SEQ ID NO: 699 - DNA, 260 bp, Artificial Sequence
  Description of Artificial Sequence: Synthetic polynucleotide
gttggcaatagtacgatttctagaattaaacataacgtttcgtggtcagctactaagtaaaaaaaaagccccctatatttctagggggctactagtgttttctaacctgctactactatttcgactcgttatagagtgctactaacttatatcgagatatgcctagacgttctaatgcatattctaatagttcactatcttcataatcttcttttctacaatagtcacagctagaatcttgctcccacgtttctcccgga

SEQ ID NO: 700 - DNA, 260 bp, Artificial Sequence
  Description of Artificial Sequence: Synthetic polynucleotide
ctcgaattgattgagagtaacggtggtgtgaccgagggtagtttcaccgaagaatatcagtgtcaaatctgcaatctcacaatgactattgcaggggaggcagatcaacctcctgatatgtggcagaagtatggcgcggcgtatgatggcgagtaagtaacggacgtatctttttctttttgcgggttgtattgctggtaatgactgatatttgtggcgtagagacaactaaaggtgagccatgtcagaatcctgttgag

SEQ ID NO: 701 - DNA, 260 bp, Artificial Sequence
  Description of Artificial Sequence: Synthetic polynucleotide
aatctcgaactgacagatagccgtggagcaaccgatgagggcagttttaccgaagaatatcagtgtgccaactgtaagttgacaatgactatcacagggaatgccgaagacccacctgagcaatggcagaggtacggtgcagcgtttaacggataactgacggacgtatccttttctttttccggttcgtattgctggtaatgactgatatttgtggtgtagagacaactaaaggggaaccgtgccagaatcctgctgag

SEQ ID NO: 702 - DNA, 260 bp, Artificial Sequence
  Description of Artificial Sequence: Synthetic polynucleotide
ataagtaaaagtacagtttctaaaataaaaaacaatattttatggaaaaacgttatataggaagaaactcgacttttttaattaaaaacgttgatttaacagtatttagttgcaatttaagtttttctttcatataatggatacataaattgatgaaagcaacaaaatataggagtgagtacctttagagtaccgatagatatgattgtcattgcgacaattgtatttgttggtactcttttttgttgtcttacagtttt

SEQ ID NO: 703 - DNA, 260 bp, Artificial Sequence
  Description of Artificial Sequence: Synthetic polynucleotide
cgcacaatattctgggcaacccgctagggttcaatgctggcaatgtccagaatgttaacctacaacatgttaacttaggcgctgttgatgcagaattgcagtttggtaacctaaaagttatcattacaaaagaaaactttgcaaaagttgcacgagagttaatgtaatacacttgacagtgacgtaaaaaggtggtaaacttgttagttccaaaagagaaaaaacttattcctaatgagcttcttccacctaagtatcaa

SEQ ID NO: 704 - DNA, 260 bp, Artificial Sequence
  Description of Artificial Sequence: Synthetic polynucleotide
agaggaaaagagtttagaaatatcctatattatatctaatatttaggatgttacgtttttcaacaataggacattatataaatttaaatagccttaatgatagaatttgcaaagaacaggatagttttattaataagtctgaaaaacactattaaaggacatttatacgaggaatttaagataatgtataaacataaaaaatgaagcaaaggagtgattgtttgaatgacaaagatgttgaaatagttaatgatagctat

SEQ ID NO: 705 - DNA, 260 bp, Artificial Sequence
  Description of Artificial Sequence: Synthetic polynucleotide
tcgacataattgtattagctcagatgtttcaagatatgataatattattgcgattattgggtcgatcattttattgatatgagaaataaaaattggtaggtgtgttgtgattttatttcaatttttatagcaaaaattgaatatggaatgatatattgatctcattactagaggaacttaacattcagcgctagcggatcatggggaggcgcacttttttcactgaacatcagaatcaaatattagctatgtggtttgat

SEQ ID NO: 706 - DNA, 260 bp, Artificial Sequence
  Description of Artificial Sequence: Synthetic polynucleotide
ctggaagaactcgtcgaccgccgagacaggcccggacttgtgacgggctacaccaccaacctcggcctgcaccgccaggagtctgcgccgagtgacttctccgccttcgttggggcgcgcgtcgtctctcggatgtgccgacaggggacctacctgcttcgcgactgcgggacgcgagacctgcggaaggaaggcacgccatgacgtgcaaccgtcagcccaaggtggtgcactaccgcggcaagtccggtgacacctcg

SEQ ID NO: 707 - DNA, 260 bp, Artificial Sequence
  Description of Artificial Sequence: Synthetic polynucleotide
ggcagtcattattaatacgatattcatctttattcaaaataggtattttagattattaaacatttggttttgttttaatcccccgggggaggtcaaatctggtgaggggctggcaggcgctcgtaacgttccgccagaatttttaaactcggggggctatacaaaatatacgaatttcaaggcaatcgatactaaatcggttgcctttttctatttcaggaagaaaggggagcgaaatgatggcgaagttagacgaatta

SEQ ID NO: 708 - DNA, 260 bp, Artificial Sequence
  Description of Artificial Sequence: Synthetic polynucleotide
taagggggtaactggagtgcaaatgtgtcgtagatgtggatttgatcaaatgagagaatcaaaattctgttccaagtgcggcgctatacatccagtacgtgacaaatattttgctgctaacaaagattttttaattgaattagcacttaaaacgagagataaagaatggtttgaacaattgaatagggggattgttactgatgttaaataaatttgaaaagaaagaagttagaacagtgattactggcttgttaacacat

SEQ ID NO: 709 - DNA, 260 bp, Artificial Sequence
  Description of Artificial Sequence: Synthetic polynucleotide
tgtggtctgccgcgaatcttatcaaggtagatgccgaggcaggtgttattcattgccaacgtaaataccatcgtgctggtcaaatcatagctgagtctatgacttgggcaggtaagtatttaaacatgcgttgccctatgtccggggaatttaagatcggaagttcatgggctgaaacgcactaacatgggaaaaggaaaatgcaagagtgggttcgcattacaagctatcctaactatgctgtgtcgaacgaaggtgag

SEQ ID NO: 710 - DNA, 260 bp, Artificial Sequence
  Description of Artificial Sequence: Synthetic polynucleotide
caccgacagcaagagcccgatctattcgggtacgaggatgctccaaagcggttgcactgaccgcccctacatcaagccccgcctagcggggctttttgcttaaagcccccggaaatacagcgcccttgctgctcgggcgaacctagccaggtccattcatctggcagattcgaacatgcttgagcacgccacctcttcagcggaattcgcccagcgcgtcattgacgagcgctgcgagaagacgcgccaacgaatgatcg

SEQ ID NO: 711 - DNA, 260 bp, Artificial Sequence
  Description of Artificial Sequence: Synthetic polynucleotide
tcgtccggggttcgggttcgaggacgtctgggagtggccgatgaaggacttcgaccaccacttcctggtcagcctgtgggcgatcgtgtggggcatccagcagtgggacacccgcgagcacaagacgcagctggattgggagcgcgaggaccacgcccgcacgcgggcggagctggccaacctgcggcggtaccacaaccatgtctgagctggaggagctgcgcgccgaggtcgaacgcctccgcgcacgcgccgacgag

SEQ ID NO: 712 - DNA, 260 bp, Artificial Sequence
  Description of Artificial Sequence: Synthetic polynucleotide
gatagactgtgtagattcggttacgaacttatcgaatggatcgttggaagatacggttgacgaatcgtcgttttggatgaaaagacgttcgaatccgaagaaaccgaactcgcaaacgatttattatccattaccacgtcttcagttgtaaacaattgggaaaaagacgttataaaaaatctaaaagtaagaatttatccaacaccaactcaacgtaagatttttaaagaatggtttgggacgacacgttacgtttacaa

SEQ ID NO: 713 - DNA, 260 bp, Artificial Sequence
  Description of Artificial Sequence: Synthetic polynucleotide
aaggatctttactacttcaaaaatactttcatgatggtgtaaacggtccaaaaagattaaatcaaggacaggttgaacaatactatatcgaagataatcatgaaggaattgtatctaaggaaatatgggagaaggttcaggtaaaaataaaaagccgttctcggatccaaggtacaaataaaacctataaattttccagaatgttaaaatgccaatattgtggttcaacattaaaaagacaagtttcttataagaaaaag

SEQ ID NO: 714 - DNA, 260 bp, Artificial Sequence
  Description of Artificial Sequence: Synthetic polynucleotide
ttaatctattaaatgaaaattcaagtaaagatgttgctaggattacagaagtactaactgataacaacaattacttttataagctaacaggtgaatacgataaggtatttaaagaaagtgagttaactttagtaaaagatattgacaagaatgattaagtgtagtatgatataagtatcaaaacaaaaggagttttttatatgtttatttcattaaataaagaagaagagaagattttaggtacagaaaataaaaaagaa

SEQ ID NO: 715 - DNA, 260 bp, Artificial Sequence
  Description of Artificial Sequence: Synthetic polynucleotide
ctagaaccgattctacagaacaaaacactggtactaaacgataggcatacgatactgctcgaccaaatggcgcaatatccattttctgaccacgatgactcattagacgcctgccagcttgctgttgataatatttcaagacctgttgcacgggttgtagcaaagcctgcgtatctataaaacgaaaggagcaatttggaatggcgaatcctagacgaatgaaagcactagaagcgaaattgacggcgcaacaacgtaaa

SEQ ID NO: 716 - DNA, 260 bp, Artificial Sequence
  Description of Artificial Sequence: Synthetic polynucleotide
gcattagtacctaacagcaactttatgaaaacatggtcgagttggtcaccaagcccataaaaacggcgctttttccttaaaaatcaaggtgaccgagaaaaacaccgcttgtctccctgtagtcacctatttctggtcaccgttcatcttttcggctacaatccctatattgacttttatttataattattgggggttacatggaattaccgcgcactgtgcaggaaatagctgacgttattggccgtgaacgtgcgcta

SEQ ID NO: 717 - DNA, 260 bp, Artificial Sequence
  Description of Artificial Sequence: Synthetic polynucleotide
gacacatcacctgcaaatgacaaccatcagcaccgactactaatgactacggggcaataactggcatgaatatttttgagaagtttctggataacattggatgggcaatcgctggtttaatgggtgcgttgattgctgttccttttcacgatgataagagcatcaaaggccgtctgtggtttgtttgtagcgggcttgcatgttcttactttcttactggctggacgtcatggttttacagcatcccgcagcaatacact

SEQ ID NO: 718 - DNA, 260 bp, Artificial Sequence
  Description of Artificial Sequence: Synthetic polynucleotide
aaaaatataatttttttataatgatacatcgcagattaaaaatataattataataaatattcaatataaccatataatttatctgcgatgtattattataattataggtgtatataggtttctgtaatgttccaatataatcagatttattttctcaaaaaatataatttttttataatgatacatcgtagataaattatatggtcatattgaatatttattataattatattattatcgttcccgaaatatccagatta

SEQ ID NO: 719 - DNA, 260 bp, Artificial Sequence
  Description of Artificial Sequence: Synthetic polynucleotide
aacgaaggaggtacgtaaggatgaacgacacgattacgaagtttactcgctgtggtgattgcgtattccacgacagtaccgaaaatatatgcgagttgttaggcgtcgtagccgagacaacagacggatgtactttcggagtgaccgatagtgacatcgaagatgaaataacgtaatgaaaacggaaaggagtggatagtatgccgaataaattcgatgacctgtccgagcaacagaaacgggcagccgaattattgctc

SEQ ID NO: 720 - DNA, 260 bp, Artificial Sequence
  Description of Artificial Sequence: Synthetic polynucleotide
acagacatgaaagcagatttgcgtcaaatgaatggtgacatcagacacattacagaaatagtcaatgatgtagaagatagacaaaaagaagatacaagagaaatatttgatgagattaaaatcatcgaagataaccttaacttaaatattaataaggcattgaacaatccactaaacaatatgtcagcaaaggtaaaataatgacaacagcagtagtaaacaaacaaggtaatcgtcctgctaaatacaaacaaagtatt

SEQ ID NO: 721 - DNA, 260 bp, Artificial Sequence
  Description of Artificial Sequence: Synthetic polynucleotide
cagctcagtattgcccgctccacggtttataaaattcttgaagacgaaagggcctcgtgatacgcctatttttataggttaatgtcatgataataatggtatcttagacgtcaggtggcacttttcggggaaatgtgcgcggaacccctatttgtttatttttctaaatacattcaaatatgtatccgctcatgagacaataaccctggtaaatgcttcaataatattgaaaaaggaagagtatgagtattcaacatttt

SEQ ID NO: 722 - DNA, 260 bp, Artificial Sequence
  Description of Artificial Sequence: Synthetic polynucleotide
aatgagagcgaagatttttctgatgaacccactaaagatgaggctagagaattttatttgagaaacttgattgcttttatgctggtagctgaagatgatgatataaaacgttcttgtgccaaagcattcttgacgttcccagaaaaaaacctggacattgctttgagtacagaactattgactagagaagatttagagaggtggtcaaaatagcaaaaggaaaatataaagaatggctaacaaatgagaagttagatatt

SEQ ID NO: 723 - DNA, 260 bp, Artificial Sequence
  Description of Artificial Sequence: Synthetic polynucleotide
tggccggattgctgacgttctggctctcctttcgttttcgcgctcgtctgttcgggtaaaggggcaccatgtacagaaaattcagtgatgaatgtttcgggccgtccacgctgattagtgcgataaaagtgattgcccttgtggttctgataaccatcagtgccgtggtgtatctttctgtctgttaaccgggggaaaatatgcagcatgatttatttgaacacgatccggcaattcgccagttaatcggacatattgat

SEQ ID NO: 724 - DNA, 260 bp, Artificial Sequence
  Description of Artificial Sequence: Synthetic polynucleotide
tggccggattgctgacgttctggctctcatttcgttttcgcgctcgtctgttcgggtaaaggggcaccatgtacagaaaattcagtgatgaatgtttcgggccgtccacgctgattaatgcgataaaagtgattgcccttgtggttctgataaccatcagtgccgtggtgtatctttctgtctgttaaccgggggaaaatatgcagcatgatttatttgaacacgatccggcaattcgccagttaatcggacatattgat

SEQ ID NO: 725 - DNA, 260 bp, Artificial Sequence
  Description of Artificial Sequence: Synthetic polynucleotide
cgcgtagtcgctaaaatgcgcaagatagaagttaagaaccgtcaaccgaatttattttaaggaattgaaaatgaaagccattgctttattactatcatcattattttgtatgcccgtgttggcaaaggacttaccaccagtaaatgaaatgctccatcgcttagatgttgctggttatagcaacgccgataaatgggaagatattgaaggtacaaaaaagcaagatttagaaactggaacattgtttgttagtcaatcga

SEQ ID NO: 726 - DNA, 260 bp, Artificial Sequence
  Description of Artificial Sequence: Synthetic polynucleotide
gaaaggctggcagtcagttgatatgccggaaattcttcaccactgtcaacgttataaggaaaaatattgtgtacagaaaattcagtgatgaatgtttcgggccgtccacgctgattaatgcgataaaagtgattgcccttgtggttctgataaccatcagtgccgtggtgtatctttttgtctgttaaccgggggaaaatatgcagcatgatttatttgaacacgatccggcaattcgccagttaatcgggcatattgat

SEQ ID NO: 727 - DNA, 260 bp, Artificial Sequence
  Description of Artificial Sequence: Synthetic polynucleotide
gattaccaaaaacttaagtggtggttacgaaagacaaaaagcactcgagcttattttaagctacacagcaaagaaaaacataataacagaatttgacgatgccttatttttaaggcatgttgaccatatcatagtttatagcagaacggaaattggctttgttatgaaatttggacctatttttaaagagaggatttaagatgaagcatacaccatatggatatattatcgtggacggtaaggcagtagtaaacgaaaaa

SEQ ID NO: 728 - DNA, 260 bp, Artificial Sequence
  Description of Artificial Sequence: Synthetic polynucleotide
tatcaaattccgcgagtgggattttgcgagcaaacgagataaaggacctcattgattacgtatcagcagataattttaatggtgactacacggaagagatatttgaagaatttgtagagaacatcattgtaaattccagggatgagctgacattcaatttgaaatgcggtctttccctgaaagaaaaggtggtgagataaatggcatatattccatatggatacaaaattcaagatggagtggttactgtcgatgaaaag

SEQ ID NO: 729 - DNA, 260 bp, Artificial Sequence
  Description of Artificial Sequence: Synthetic polynucleotide
agaatttctgagaaaaccgttggataaggaacttcttattgcggtagaagagagatataagtccaactcagttgaatatagtgcagaaattattacaaaagagatgtataaacgtgcagttgagaaagtagaaaaatgcaaagaataataattaaatgtggtaaagtataattaagataaaaacaggaggtaagttataaatggaaaaatgtacttatacaagaaaatataaaaatgaagatgaaaagggtggcacacca

SEQ ID NO: 730 - DNA, 260 bp, Artificial Sequence
  Description of Artificial Sequence: Synthetic polynucleotide
gtgaaaagcattaacggagatttaagtcatttagatgaggcacagaaacttcttagatttacatctaaaaaagaagttatcacagaatttaatgatgccttatttctagaatatgttgatacgattaaagttaataacagaaatgaaataactttcgctttaaaatgtgggctgaatttaacagaaaggttggtaaagatatgacacatacaccatatggataccgcatcgaaaatggaatagcggtagttgatgaagtt

SEQ ID NO: 731 - DNA, 260 bp, Artificial Sequence
  Description of Artificial Sequence: Synthetic polynucleotide
ttccagttctctaaagttgacatcgtgcggatgttcccgatcttcgtcaccattctcggcgtgggccttgcggaagtgatcgaggatgaaaaggctctgaaggccggagttaacgcgctgattgattgccttgaggattgcggcgacgctgagcagggattgcgcctggctttacgtgccatgcttgagggccgcaaataatgaacgtgtctatcagggccattcaggcgatcatggagaacgccattgaagatggtaag

SEQ ID NO: 732 - DNA, 260 bp, Artificial Sequence
  Description of Artificial Sequence: Synthetic polynucleotide
ttagaagttgatgtatctacaatatatagaaataaaaaagagataataaataaacttatgaaagtaatagtattttaatagtaatatacttgtaatgtactattttattacatctagtaatatgttattatgttatcatacggagtacccgaaagaggtactcttttttatttatgtaaaatgtaaaggaggtggttataatggctgatatattaacaactaaagaatcagatatgattacaatgcttatagaaggtgtt

SEQ ID NO: 733 - DNA, 260 bp, Artificial Sequence
  Description of Artificial Sequence: Synthetic polynucleotide
gtgggggagtttgagctattcacccgacccgcgcccgccgctggccttgctgatctggtgccgggtgaatttgataattggaaaaaccccgcatctgaagcgatgagcgcgattggctacgttggcaataagcaagatttcactatgggcgctaactggatgcgcgctgccgttctgcgaaacattaatggtggcaactaatgaacgtgtctatcagagccattcaggcgatcatggagaacgccattgaagagggtaag

SEQ ID NO: 734 - DNA, 260 bp, Artificial Sequence
  Description of Artificial Sequence: Synthetic polynucleotide
ttcccgttctctaaagttgacatcgttcggatgttcccgatctttgtcactattcgcggcgttggtcttgcggaagtgatcgaggatgatgcgtcattgaaagccggtgttaacgcgctggttgattgccttgaggattgcggagacgctgagcagggattgcgcctggctttacgcgccatgcttgagggccgaaaataatgaacgtgtctatcagggccattcaggcgatcatggagaacgcaattgaagatggtaag

SEQ ID NO: 735 - DNA, 260 bp, Artificial Sequence
  Description of Artificial Sequence: Synthetic polynucleotide
ccaatccacttcggatactggtgcgggtgtaactaccattgtgttgtgttttggcctcgcttttgcggggctttttttcgtgcacaggtagcgttatactgtaaccataggttccacaggcaccccgccgcctaactcctccctgccagccgatgtggggcaagtcttgcggggaatcggcacccattaaccaagtgtgaatgaccatggcgcgaccgacgaagtacgatcctaagttctgtgatgaagcacgcgagatg

SEQ ID NO: 736 - DNA, 260 bp, Artificial Sequence
  Description of Artificial Sequence: Synthetic polynucleotide
atgccaagaagcgggtgcttctgcaggaaaagacgaccgaccagatccgcttcatgtccgctggggacttcaagaaattgctctaaacccaaccatgacgtacatggactggcttgacaggctggcaaagcatatggttgactaggtgtacatggtgaggccctacccggggcctcaccggtcacccagtaggagccaccttgacgcacatagctagtgagaaacttgagcagattcaagacctgcttgacaaccagctt

SEQ ID NO: 737 - DNA, 260 bp, Artificial Sequence
  Description of Artificial Sequence: Synthetic polynucleotide
gatgccaagaagcgggtgcttctgcaggaaaagacgaccgaccagatccgcttcatgtccgctggggacttcaagaaattgctctaaacccaaccatgacgtacatgggctggcttgacaggctggcaaagcgtatggttgactaggtgtacatggtgaggccctacccgggcctcaccagtcacccagtaggagccaccttgacgcacatagctagtgagaaacttgagcagattcaagacctgcttgacaaccagctt

SEQ ID NO: 738 - DNA, 260 bp, Artificial Sequence
  Description of Artificial Sequence: Synthetic polynucleotide
tatcatggaggttgtatgagcaagaaaggcaagaaagctttacagcagatagcggaccagtcagtctatgactttcaagcaagtcagtctatgtggttctgtgagtgagcaatcaaccttatggcgtctaccatgccaattcatgaagtagcagagtatttgcgtcgtcaggtgaagattttagaggaatatgaatagttatggctggcggtcgtccaaccttatacagaccagaatattgtgagacagtcattgaactt

SEQ ID NO: 739 - DNA, 260 bp, Artificial Sequence
  Description of Artificial Sequence: Synthetic polynucleotide
tggccgaagtgatcactaaaagtggtggtcgcattccatcgaacaacgattgcacaggcccagctggttatgagctattagctgagcattatgcgagtaactactacaaaactggttaacgtgccccaccagtaaacactgccatatactacaaacacctcgccaagcggggtgtttttatattcatactatgtgaaggtatgccatgtggatgggaggcagtaatgagtgaagaaaaccaagacttgtttggttacaag

SEQ ID NO: 740 - DNA, 260 bp, Artificial Sequence
  Description of Artificial Sequence: Synthetic polynucleotide
ttgatggaaagaaatatttggtctttagcgtcattcataatcttgatggtaatgaatcgacagtaattgctgattttatggggtaacctgcttaacgtgccccaccagtaaacactgccatatactacaaacacctcgccaagcggggtgtttttgtatttatactatgtgaaggtatgccatgtggatgggaggcagtgatgagtgaagaaaaccaagacttgtttggttacaagaatgtaagcctagaagaagttgaa

SEQ ID NO: 741 - DNA, 260 bp, Artificial Sequence
  Description of Artificial Sequence: Synthetic polynucleotide
atagcaaaacacttggatatttctaggatgtctgtttaccgaatattaaagggggcttaaatgccaattgctatagtaagaaatccagaagatacaatctgttcattcaaagtaactattgtaaataagatagacaatcttatgacagaatgtaagactcataattattcagtgcaagatgtcatccaagaaataacagatgctctgccagataattattttgtttatgaaattgtaaaccttgaaactaattctaccta

SEQ ID NO: 742 - DNA, 260 bp, Artificial Sequence
  Description of Artificial Sequence: Synthetic polynucleotide
aagctggatttactggaaccattaccgatgcatcagaaggttataatggattccaagagtatgaagttacatgggacatttcaggatgtacctctgacatgttggtgaatgaaattgaaccaatgaaagagggacaagataatccacaaacacagaatgacatccataagaaacaatttggtgattaaaggagaagtgaaatggcagacacacttcataccgtaccaaccaagccgctcactaaagaggataggattgag

SEQ ID NO: 743 - DNA, 260 bp, Artificial Sequence
  Description of Artificial Sequence: Synthetic polynucleotide
tccacgctggcttggtgccacggagaatcgttgcaagttgtgcttgaaaccctgaaacagtggcacatccgctgtattcgtgaagccttttcccgtcacgggcttccgttgccggtcagtccgtccgggcgtgaactgcgcggctatgatgccatgacggcggcttatgcccatgccagaaagacacggaggatggcacaatgacggaagatttatttggtgatttgcaggatgacaccatcctggcacatcttgacaat

SEQ ID NO: 744 - DNA, 260 bp, Artificial Sequence
  Description of Artificial Sequence: Synthetic polynucleotide
tccacactggcgtggtgtcatggcgacacgctgctgacagtcctcgaaacactcaagcagtggcacatccgctgtattcgtgaagccttttcccgtcacgggcttccattgccggtcagtccgtccggtcgtgaactgcgcggctatgatgccatgacggcggcttatgcccatgccagaaagacacggaggatggcacaatgacggaagatttatttggtgatttgcaggatgacaccatcctggcacatcttgacaat

SEQ ID NO: 745 - DNA, 260 bp, Artificial Sequence
  Description of Artificial Sequence: Synthetic polynucleotide
cccgccgaaaaacagcagcacctgcgtgattctgtcctgccagagaccagcaaaccctgaagacatgcacccgcccgcctgagctgacactctgagcgcacccataacacggagtgcatcagatgtctgattatcatcacggtgtccgcgtcgtcgaaatcaacgacggcacgcgcaccatttccaccgtatccacggccattgtcggcatggtctgtaccgcagacgatgccgatgcggccgccttcccgctcaatgag

SEQ ID NO: 746 - DNA, 260 bp, Artificial Sequence
  Description of Artificial Sequence: Synthetic polynucleotide
attctaaatggtactgcttataatgacattgttcaaaaacacaatttaatagcaaaataaaaaaccgcttatagcggttttttattttttaatatttttctacataccaaccaaattctacatgggcctctaaatcactaagtactttaattctaacttctggagcgccatatccataactatcttcccacaaactagaaaatgaacgagctctatgcaatctatgaactctccctttagaaaaagtaccatttttcttt

SEQ ID NO: 747 - DNA, 260 bp, Artificial Sequence
  Description of Artificial Sequence: Synthetic polynucleotide
gtctcctgcgcggtggacgcctaccacgacgaaacctcagagaccgctgctgcggcctgactgtcaaccgaaagaggagtattacaccgatgagaaccagagtgaacgtaggccgggtgatcctgccgctccacggcaagggggctttggcatgagcggcctagacgatctgttcggcgtcgaggccgggatcggccacaactccaccgacagctaccgcatcaccgcctccgaactgcgccagttcatcgagcgcgtcg

SEQ ID NO: 748 - DNA, 260 bp, Artificial Sequence
  Description of Artificial Sequence: Synthetic polynucleotide
tccctccttgaaataaataccggcacaatccggcattttaccggcattcctgctttaaagagacggtgctatttaaatgtgctgatctctttaaggtgttagtgagtgccggattttttatactaatcagaattatactaatttaaattattatattgattgtttttattttaaatgaggagatgagagaggtgaggtgaatgaaaagaaaagagttgagaaaagttaataaaaaagggatttccaaaagacaacagaga

SEQ ID NO: 749 - DNA, 260 bp, Artificial Sequence
  Description of Artificial Sequence: Synthetic polynucleotide
tttcatgttgtgattctcctctattcgtgtcgcttggttgacatgtaggtccatttggaccctacgtccagcatcttttctctttttgggtgaaattatttttacgctcaactttccccttttggttgacatgtgactcgagccaggagtacggatcggacaacccggcccggaatcgccggacctaagaggagagaaatatgtcgtcaaaacccaagcccggtttcatgcgcccgagggcgaaccgggaggagatggcc

SEQ ID NO: 750 - DNA, 60 bp, Artificial Sequence
  Description of Artificial Sequence: Synthetic oligonucleotide
gtggctaaatcaaacgcaggaagaccgtcaaagtatgatgactcattccttggtatcaca

SEQ ID NO: 751 - DNA, 260 bp, Artificial Sequence
  Description of Artificial Sequence: Synthetic polynucleotide
aaaccgcacttttcaggtgtaggagaacgtagcactggagaagaacaggaaaataaaaccacatatcagcaaatggatcaagcaaaagaggatgcgattttatatatagatcgtatatatcgattggggcaaccagttgaaaacttagaaggctacgatatttggaaagcatggaaagaacaacaaataggagctaaatgatgagtacaaatgcagatatttttgatgaaaaagcacctgaaatcttagctgatttagct

SEQ ID NO: 752 - DNA, 60 bp, Artificial Sequence
  Description of Artificial Sequence: Synthetic oligonucleotide
tgagtaaatcaaacgcaggaagaccgtcaaagtatgatgactcattccttggtgttacag

SEQ ID NO: 753 - DNA, 260 bp, Artificial Sequence
  Description of Artificial Sequence: Synthetic polynucleotide
cgcgaggagatcgccgcgcgccaacgcgacctgtttgcaagtccgacttccaccgattgagcccgagggggctaccttgacaggtaggtagccgcctctcagaattctctacagccgtcgaagcagtgccacaggatcggtccgcaagtgttgtcgtaaatcccgcgtccgccagtggacaacggtgttgcccccaccacaagggcggggacaaccgctacgcggttccaccgttgaccactgtctcctcgcgaaccttg

SEQ ID NO: 754 - DNA, 260 bp, Artificial Sequence
  Description of Artificial Sequence: Synthetic polynucleotide
cgcgaggagatcgccgctcgccaacgcgacctgttcgcgagccccacttctaccgattgagcccgaggaggctgccttgacaggtaggtaaccgcccctcagacttctccgcagccgtcgatgtaatgccgcagaatcggtccgcaggggtcgtcgtagatcccgcgtccgccagtggacaacggtgttgcccccaccacaagggcggggacaaccgctacgcggttccaccgttgaccactgtctcctcgcgagccttg

SEQ ID NO: 755 - DNA, 260 bp, Artificial Sequence
  Description of Artificial Sequence: Synthetic polynucleotide
caatccagcccattagtaaacgattttttaaggtattaccgttgcgatttttcataatatgccctctggttaatatactattataatacactctttgtgtacgtattacaacaaattaccatgtaacaagggcattacagtgtaattaatggtttaaatttatagagtaataaacaaacacaatagatagggtaaagatgatggctaaattaggtcgaccgactaaatattctgatgatgttggagagatagttcttgat

SEQ ID NO: 756 - DNA, 60 bp, Artificial Sequence
  Description of Artificial Sequence: Synthetic oligonucleotide
ttgactaagcaaaagattggaagaccaactaaatacaaagatgaatattgcgacaaagct

SEQ ID NO: 757 - DNA, 260 bp, Artificial Sequence
  Description of Artificial Sequence: Synthetic polynucleotide
cgcaactacggggtcaacccggccaccatctcccgcatcgtcaaccgggtctactactgatgagcgaccgcgctcaggtggtagtgatcctgccccgcgacggagccctgccgatcgacgtgcagggcgtcaacactcggcgcttggcgatcgagcgcatgtcggagctgggcgaggtggacgagaacagcgtccgctacaaggccggtaccgaagaggccacggtctcgttcgggggtccgaactacgtcagcctgtgg

SEQ ID NO: 758 - DNA, 260 bp, Artificial Sequence
  Description of Artificial Sequence: Synthetic polynucleotide
acgatgcgcaagaagggtttgcttccggcttatgagccagagtcttacgagtatgtaggaaccagcgaaacgctcggggtggtgaggttcagatcactcagtcatgcgcacgaggaaggatttccatccagcatggtgagcaaggcggtaaacgggaaaatcagcagttacgcagggtacacgtgggagaaggtggcaaaatgaaaaagcatatcgagatgcgcttggcggatggcgcaacgcttgacgacatcaaggca

SEQ ID NO: 759 - DNA, 260 bp, Artificial Sequence
  Description of Artificial Sequence: Synthetic polynucleotide
cagtggctagacagccacgggattgaatcaccggcgttagaggagcacgagcgggattgagaacaagagtttccgtgcgaccaccactatccacatgaggaccgcgaaggcctgcttgagttgtccaaggaaacacggttgtccaccagatttactgaggttcatgttgtagccaccccaacatgcggtatagcgatgacaactgacagaggtgacggtgggagcgagcgggcacaatccccgagcgacgcataccgtga

SEQ ID NO: 760 - DNA, 260 bp, Artificial Sequence
  Description of Artificial Sequence: Synthetic polynucleotide
gagtgagtgattatgaaagagatatttgcaatatgcgtactaatactaactatatggtttatcaagaatgaaccactgcaagatgcgctgcttgtactgctgactaagtaaaatctgccctgcttatcgtggggctttttatttgttatactgtataaaactcaggcgagtaaattttatgttaatcaggagattgatatatgacagcaggtagacctacaaaatacaaagaagagttatgcaagaggagtgtagctttt

SEQ ID NO: 761 - DNA, 60 bp, Artificial Sequence
  Description of Artificial Sequence: Synthetic oligonucleotide
tggctaaatcaaacgcaggaagaccgtcaaagtatgatgaatcattccttggtatcacag

SEQ ID NO: 762 - DNA, 260 bp, Artificial Sequence
  Description of Artificial Sequence: Synthetic polynucleotide
acgatgcgcaagaagggtttgcttccggcttatgagccagagtcttacgagtatgtcggaaccagtgaaacgctcggggttgttaggttcagatcactcagtcatgcgcacgaggaaggatttccctccagcatggtcagcaaggcggtaaacggggctatcagcagttacgcagggtacacgtgggagaaggtggcgaaatgaaaaagaatatcgagatgcgcttgactgatggcgcaacgctaaacgacatcaaggct

SEQ ID NO: 763 - DNA, 260 bp, Artificial Sequence
  Description of Artificial Sequence: Synthetic polynucleotide
acgatgcgcaagaagggtttgcttccggcttatgagccagagtcttacgagtatgtcggaaccagtgaaacgctcggggttgttaggttcagatcactcagtcatgcgcacgaggaaggatttccctccagcatggtcagcaaggcggttaacggggcaatcagtagttacgcagggtacacgtgggggagggtggcgaaatgaaaaagcatatcgagatgcgcttggctgatggcgcaacgctaaacgacatcaaagcc

SEQ ID NO: 764 - DNA, 184 bp, Artificial Sequence
  Description of Artificial Sequence: Synthetic polynucleotide
caggatcgtaagttcgaacgtgaccagggcaaactggacctcggcgacggcctggcctgaccggccgccgccttttcatccttggaaactctttttcaaagcctatcccactaaatccctttcccttcctctatatcccacaattttctcgctttaccctcctggtttatctcactctctctca

SEQ ID NO: 765 - DNA, 184 bp, Artificial Sequence
  Description of Artificial Sequence: Synthetic polynucleotide
caggatcggaagttcgaacatgaccagggcaaactggacctcggcgacggcctggcctgaccggccgccgccttttcatccttggaaactctttttcaaagcctatcccactaaatccctttcccttcctctatatcccacaattttctcgctttaccctcctggtttatctcactctctctca

SEQ ID NO: 766 - DNA, 260 bp, Artificial Sequence
  Description of Artificial Sequence: Synthetic polynucleotide
acgatgcgcaagaagggtttgcttccggcttatgagccagagtcttacgagtatgtcggaaccagcgaaacgctcggggttgttaggttcagatcactcagtcatgcgcacgaggaaggatttccatccagcatggtgagcaaggcggttaacgggactatcagcagttacgcagggtacacgtgggagaaggtggcaaaatgaaaaagcatatcgagatgcgcttggctgatggcgcaacgctaaacgacatcaaggct

SEQ ID NO: 767 - DNA, 260 bp, Artificial Sequence
  Description of Artificial Sequence: Synthetic polynucleotide
attccagagggagccaagaaatctgatatcttcgtcatagaagaccatattaggtttaagaaatgactcatatacgattaattcaatttttcgaaaaaatgatcagcaaaaattgaatatggaatatcatatgggtctcattattgaagcaacgaagtatttggcgctgggttgttgattttgtgaacaaaccataaatcatggcgagtgttgacgatgaaaatagcgatgatgatactggccgtcaggctttcaataaa

SEQ ID NO: 768 - DNA, 260 bp, Artificial Sequence
  Description of Artificial Sequence: Synthetic polynucleotide
cctgattgggaatcgcaaaccgcggcaacagttgtctggctgtccaggcgtatccgtgtcggcgactcgctgggtgtgtgggactacctcaccaagcttcccgttgatcagcgcaccagattgttgatggccgcgctggctggaatcccagatgttgatgacccgttcgcgtggatcactgaggaagtggagcaggtcgcatgagcaacggaaaccggctcacccctgagcaggtgaagatgatcctgtcgatgacgcgt

SEQ ID NO: 769 - DNA, 260 bp, Artificial Sequence
  Description of Artificial Sequence: Synthetic polynucleotide
gaagtggaccccgaagtgttttttcccgagaagggtggaagcgcgaagccggctaaacggatctgcagccggtgcgaggttcgggtcgaatgcttggagttcgcgttggcgaaccgcgagaactacggggtgttcggggggttgtcggagcgggaacggcgtcctctgctcaaagcgatcgatggtgaggatcaggtggcatgagcaacgggaacaggctcaccccagagcaggtgcagacgattctgttgatgactcgt

SEQ ID NO: 770 - DNA, 260 bp, Artificial Sequence
  Description of Artificial Sequence: Synthetic polynucleotide
gatctggacgccattgaacgggccttcaagggcgcgttcgaggccgcgacggtcgcctgtccggaactgggcgagatgccgtcgcacgaatgccaggcatggcggaagaaggcgcgcaagttttccggtgccaacagcctgcgggtgcggatgtttcgggcctgctcccgctgtgcgctaaacaaaaagggagacgcctgatgcccgctccccatcccaagcgcgccgaggttctggcgctggcgcgcgccggcatgcgt

SEQ ID NO: 771 - DNA, 260 bp, Artificial Sequence
  Description of Artificial Sequence: Synthetic polynucleotide
gctgattgggaatcgcaaaccgccgcaaccgttgtgtggctgtccaggcgtatccgtgtcggcgactccatcggcgtgtgggactacctcaccaagcttcccgaggaccagcgcacccaactactcatggccgcgttggctggcatccctgatgtggaggatccgttcgcgtggatcactgaggaagtggagcaggtcgcatgagcaacggcaacaggctcacccctgagcaggtgaaaacggtgctggcgatgactcgt

SEQ ID NO: 772 - DNA, 260 bp, Artificial Sequence
  Description of Artificial Sequence: Synthetic polynucleotide
gaagtggaccccgaagtgtttttccccgagaagggtggaagcgcgaagccagctaaacggatctgcagccggtgcgaggttcgggtcgaatgcttggagttcgcgttggcgaaccgcgagaactacggggtgttcggggggttgtcggagcgggaacggcggcctctgctcaaagcgatcgatggtgaggatcaggtggcatgagcaacgggaacaggctcaccccagagcaggtgcagacgattctgttgatgactcgt

SEQ ID NO: 773 - DNA, 260 bp, Artificial Sequence
  Description of Artificial Sequence: Synthetic polynucleotide
gctgattgggaatcgcaaaccgccgcaacagttgtgtggctgtccaggcgtatccgtgtcggtgactccatcggcgtgtgggactacctcaccaagcttcccgaggaccagcgcacccaactactcatggccgcgttggctggcatccctgatgtggaggatccgttcgcgtggatcactgaggaagtggggcaggtcgcatgagcaacggcaacaggctcacccctgagcaggtgaaaacggtgctggcgatgactcgt

SEQ ID NO: 774 - DNA, 260 bp, Artificial Sequence
  Description of Artificial Sequence: Synthetic polynucleotide
gccgaagtggaccccgaagtgtttttccccgagaagggtcgaagcgcgaagccagccaaacggatctgcagccggtgcgaggttcgggtcgaatgcttggagttcgcgttggcgaaccgcgagaactacggggtgttcggggggttgtcggagaaggaacggcggcctctgctcaaagcgaatggtgaggatcaggtggcatgagcaacgggaacaggctcaccccagagcaggtgcagacgattctgttgatgactcgt

SEQ ID NO: 775 - DNA, 260 bp, Artificial Sequence
  Description of Artificial Sequence: Synthetic polynucleotide
tatttaagatgttacaaaaagagaaagggactaatagctaatattagtcctttttttatataaattggttattatgtaaaaaattgacaataatgtggatgagttttttaactattttgttaatttattatataatacatgtatacgcaaaggggtaaaaactacgaacgtagtataaattaatgtagggggagtttcgtttgtctaaaagatggacagcagaagaagataaattgttagcagtattaatgctaaaatat

SEQ ID NO: 776 - DNA, 260 bp, Artificial Sequence
  Description of Artificial Sequence: Synthetic polynucleotide
gccgaagtggaccccgaagtgtttttccccgagaagggtggcagcgcgaagccagccaaacggatctgcagccggtgcgaagtcgcggatgagtgcctggagtgggctctggcgaatcgcgagaactacggggtgttcggggggttgtcggagcgggaacggcggcctctgctcaaagcgaatggtgaggatcaggtggcatgagcaacgggaacaggctcaccccagagcaggtgcagacgattctgttgatgactcgt

SEQ ID NO: 777 - DNA, 260 bp, Artificial Sequence
  Description of Artificial Sequence: Synthetic polynucleotide
gctgattgggaatcgcaaaccgccgcaaccgttgtatggctgtccaggcgtatccgtgtcggcgactccatcggcgtgtgggactacctcaccaagcttcccgaggaccagcgcacccaactactcatggccgcgttggctggcatccctgatgtggaggatccgttcgcgtggatcactgaggaagtggagcaggtcgcatgagcaacggaaaccggcttaccaaggagcaggtgaagatgatcctgtcgatgactcgt

SEQ ID NO: 778 - DNA, 260 bp, Artificial Sequence
  Description of Artificial Sequence: Synthetic polynucleotide
cctgattgggaatcgcaaaccgcggcaacggttgtgtggctgtccaggcgtatccgtgtcggcgactcgctgggtgtgtgggattacctcaccaaacttccagttgatcagcgcaccaaattgttgatggccgcgctggctggcatcccagatgttgatgacccgttcgcgtggatcactgaggaagtggagcaggtcgcatgagcaacggcaacaggctcacccctgagcaggtgaaaacggtgctggcgatgactcgt

SEQ ID NO: 779 - DNA, 260 bp, Artificial Sequence
  Description of Artificial Sequence: Synthetic polynucleotide
gctgattgggaatcgcaaaccgccgcaaccgttgtgtggctgtccaggcgtatccgtgtcggcgactccatcggcgtgtgggactacctcaccaagcttcccgaggaccagcgcacccaactactcatggccgcgttggctggcatccctgatgtggaggatccgttcgcgtggatcactgaggaagtggagcaggtcgcatgagcaacggaaaccgacttaccaatgagcaggtgaagaggatcctgtcgatgactcgt

SEQ ID NO: 780 - DNA, 260 bp, Artificial Sequence
  Description of Artificial Sequence: Synthetic polynucleotide
gctgattgggaatcgcaaaccgccgcaaccgttgtgtggctgtccaggcgtatccgtgtcggcgactccatcggcgtgtgggactacctcaccaagcttcccgaggaccagcgcacccaactactcatggccgcgttggctggcatccctgatgtggaggatccgttcgcgtggatcactgaggaagtggagcaggtcgcatgagcaacggaaacaggctcacccctgagcaggtgaaaacggtgctggcgatgactcgt

SEQ ID NO: 781 - DNA, 260 bp, Artificial Sequence
  Description of Artificial Sequence: Synthetic polynucleotide
gctgattgggaatcgcaaaccgccgcaaccgttgtgtggctgtccaggcgtatccgtgtcggcgactccatcggcgtgtgggactacctcaccaagcttcccgaggaccagcgcacccaactactcatggccgcgttggctggcatccctgatgtggaggatccgttcgcgtggatcactgaggaagtggagcaggtcgcatgagcaacggaaaccgacttaccaatgagcaggtgaagatgatcctggcgatgactcgt

SEQ ID NO: 782 - DNA, 260 bp, Artificial Sequence
  Description of Artificial Sequence: Synthetic polynucleotide
gccgaagtggaccccgaagtgtttttccccgagaagggtaaaagcgcgaagccagccaaacggatctgcagccggtgcgaggttcgggtcgaatgcttggagttcgcgttggcgaaccgtgagcactatggggtgttcggggggttgtcggagaaggaacggcgtcctctgctcaaagcgaatggtgaggatcaggtggcatgagcaacgggaacaggctcaccccagagcaggtgcaaacgattctgttgatgactcgt

SEQ ID NO: 783 - DNA, 260 bp, Artificial Sequence
  Description of Artificial Sequence: Synthetic polynucleotide
gccgaagtggaccccgaagtgtttttccccgagaagggtaaaagcgcgaagccagccaaacggatctgcagccggtgcgaggttcgggtcgaatgcttggagttcgcgttggcgaatcgcgagaactacggggtgttcggggggttgtcggagcgggaacggcggcctctgctcaaagcgaatggtgaggatcaggtggcatgagcaacgggaacaggctcaccccagagcaggtgcagacgattctgttgatgactcgt

SEQ ID NO: 784 - DNA, 260 bp, Artificial Sequence
  Description of Artificial Sequence: Synthetic polynucleotide
cgactggtgattgagacacagttcgcatccggatccatgctgcagcgcaagctccacatcggctacgcccgcgccggccgcctgctcgacgagctggaagcgcttagcatcgtcggccccgcacaaggcagcaaggcccgcgacgtgctcgtgaacgctgccgacgtccaggccgccgtcgaccgcatcggcggtgcggaatgagcgccaccagtacacagcagcgcgccaccatcgccgaccgccgcgcgctcgtcacc

SEQ ID NO: 785 - DNA, 260 bp, Artificial Sequence
  Description of Artificial Sequence: Synthetic polynucleotide
atccgcacccagttcctcgagaccgccgaagcacttccgtgtcctgacgggtggtcgtggacggtcgtcgactacgccgcgtatcaccgtgcgtgccaggacggcatcccgacgctgcacctcgagttcgggtgcgacgacgcggtcgagttcgtgtacctcgtcggccgccacgacctcgaacccgagtcggtgacgggatgacgaccaacgttcccatccaccgcgaggaagtcgcacgccgccgcgaggccatcgcc

SEQ ID NO: 786 - DNA, 260 bp, Artificial Sequence
  Description of Artificial Sequence: Synthetic polynucleotide
atccgcaccgacttcctcacccaggcagaggttctgccctgccctgagggctggtcgtggacggtcgtcgagtacgccgcgtatcaccgggcgtgccaggacggcatccccaccctgcacctcgagtacgggtgcgacgacgacgtcgagttcgtgtatctcgtcggccgccacgacctcgaacccgaggcggtgacgggatgacgaccaacgtccccaccgaccgcgaggaagtcgctcggcggcgcgaggccatcgcc

SEQ ID NO: 787 - DNA, 260 bp, Artificial Sequence
  Description of Artificial Sequence: Synthetic polynucleotide
atccgcaccaagttcctcgagtcggcggaagctctgccctgccctgagggctggtcgtggacggtcgtcgagtacgccgcgtatcaccgggcgtgccaggacggaatccccaccctgcacctcgagtacgggtgcgacgacgacgtcgaattcgtgtacctcgttggccgccacgacctcgaacccgaggcggtgacgggatgacgaccaacgtccccatccaccgtgaggaagtcgcacgccgccgcgaggccatcgcc

SEQ ID NO: 788 - DNA, 260 bp, Artificial Sequence
  Description of Artificial Sequence: Synthetic polynucleotide
atccgcaccgacttcctcacccaggcagaagcattgccttgccccgagggctggtcgtggacggtcgtcgagtaccccgcgtaccaccgggcgtgccaggacggaatccccacgctgcacctcgagtacgggtgcgacgacgacgtcgagttcgtgtacctcgttggccgccacgacctcgaacccgaggcggtgacgggatgacgaccaacgtccccaccgaccgcgaggaagtcgcacgacgccgcgaggccatcgcc

SEQ ID NO: 789 - DNA, 260 bp, Artificial Sequence
  Description of Artificial Sequence: Synthetic polynucleotide
ggacagtacgcccgacagctcgaccaactaaagcgcctagagctagggagaaccaaatgacaggaccgagccccgccgtccgccggcaagtaatcgcgcgcgacctcagccgctgccaatggtgtggcaggcacgtccggacggactcgggctggtactcgctgcagcaccgccgcgcccgcggcatgggaggcagcaaagacaaggcaaccaaccagccggcaaacctcatccttgtccacggcaccggaacgaccgag

SEQ ID NO: 790 - DNA, 260 bp, Artificial Sequence
  Description of Artificial Sequence: Synthetic polynucleotide
atccgcacccagttcctcgagaccgccgaagcactcccgtgtcctgacgggtggtcgtggacggtcgttgactacgccgcgtatcaccgtgcgtgccaggacggcatcccgacgctgcaccttgagttcgggtgcgacgacgcggtcgagttcgtgtacctcgtcggccgccacgacctcgaacccgaggcggtgacgggatgacgaccaacgttcccaccgaccgcgaggaagtcgctcggcggcgcgagaccatcgcc

SEQ ID NO: 791 - DNA, 260 bp, Artificial Sequence
  Description of Artificial Sequence: Synthetic polynucleotide
cagatccgcacccagttcctcgagaccgccgaagcgatgccgtgcccggacgggtggtcgtggacggtcgttgactacgccgcctaccaccgcgcgtgtcaggacggagtcccgacgctacacctcgagtacggctgcgacgacgccgtcgagttcgtgtacctcatcggccgccacgaccttgcgccggaggtgtcgtcgtgacaacgaacgtccccaccgatcgcgaggaagtcgcgcgccgccgcgagaccatcgcc

SEQ ID NO: 792 - DNA, 260 bp, Artificial Sequence
  Description of Artificial Sequence: Synthetic polynucleotide
atccgtaccaagttcctcgagtcggcggaagctcttccctgccctgagggctggtcgtggacggtcgtcgagtacgccgcctatcaccgggcgtgccaggacggcatccccaccctgcacctcgagtacgggtgcgacgacgacgtcgagttcgtctacctcgtcggccgccacgacctcgaacccgaggcggtgacgggatgacaaccaacgtccccatccaccgtgaggaagtcgcacgccgccgcgaggccatcgcc

SEQ ID NO: 793 - DNA, 183 bp, Artificial Sequence
  Description of Artificial Sequence: Synthetic polynucleotide
cgaaagcaccggagacaacgccgaaccgatcagttgggcctttttgacccggccgaatgagccgggtctttctttccccagtggcaaaacattttcattgccccatcccgctatagtccgatctgtcccagtacatcccactttatcgcgctcccccaccctggtatttctcactctctctca

SEQ ID NO: 794 - DNA, 183 bp, Artificial Sequence
  Description of Artificial Sequence: Synthetic polynucleotide
gtcaggaagcaccgcaggcagcgaaaggatcagatgacgctttttgacccggccgaatgagccgggtcttcgtttcacccctggcaacaccttttcattctctcgtcccgatattccccatcccctcccgctatatctcgatttttcgcgcacctccccctaggtatttctcaccctctctca

SEQ ID NO: 795 - DNA, 260 bp, Artificial Sequence
  Description of Artificial Sequence: Synthetic polynucleotide
aaacccaaaccacccgcactgtctgccgaggtgctggcggaagcggcccgcatgctcgccgatggggcgtcacagaacgaagtggcccgcaccctgggtgttgggcagtccaccatcagcgcccacttccgcggccagggctggacccgtgagcagtccatcgagtgggtttcgttcctccgccgctatcggggtgtcgcatgaccacctggaagaaactcaccccggagcagatcgaacggatcgtgtcgttgacgtgg

SEQ ID NO: 796 - DNA, 153 bp, Artificial Sequence
  Description of Artificial Sequence: Synthetic polynucleotide
caaaggtaaataaaaatgcacagatattgcatagctttgaatgatttagtgtctccatttttatttagtttattttagattggaggggattttttgaaacttaataaaaagcatcaaaaagcaatagaattactgtttgaaggttctttaaag

SEQ ID NO: 797 - DNA, 260 bp, Artificial Sequence
  Description of Artificial Sequence: Synthetic polynucleotide
aaaccgaaaccccccgccctgtctacggagatcctggaggaagcggcgcggatgctggccgatggtgcttcgcagaacgaggtggcccgcactttgggtgttgggcaggccacgatctcggcgcatttccgcggccagggctggactcgtgagcagtcgattgagtggatttcgttcatccgccgctacaggggtgtcgcatgaggcggggcgcgaaactcccggagtgggtggtggagcggatcgtggcgttgtcgtgg

SEQ ID NO: 798 - DNA, 260 bp, Artificial Sequence
  Description of Artificial Sequence: Synthetic polynucleotide
aaaccgaaaccccccgccctgtctacggagatcctggaggaagcggcgcggatgctggccgatggtgcttcgcagaacgaggtggcccgcactttgggtgttgggcaggccacgatctcggcgcatttccgcggccagggttggactcgtgagcagtcgattgagtggatttcgttcatccgccgctacaggggtgtcgcatgaggcggggcgcgaaactcccggagtgggtggtggagcggatcgtggcgttgtcgtgg

SEQ ID NO: 799 - DNA, 260 bp, Artificial Sequence
  Description of Artificial Sequence: Synthetic polynucleotide
aaaccgaaaccccccgccctgtctacggagatcctggaggaagcggcgcggatgctggccgatggtgcttcgcagaacgaggtggcccgcaccttgggtgttgggcaggccacgatctcggcgcatttccgcggccagggttggactcgtgagcagtcgattgagtggatttcgttcatccgccgctacaggggtgtcgcatgaggcggggcgcgaaactcccggagtgggtggtggagcggatcgtggcgttgtcgtgg

SEQ ID NO: 800 - DNA, 260 bp, Artificial Sequence
  Description of Artificial Sequence: Synthetic polynucleotide
aaacccaaaccacccgcactgtctgccgaggtgctggcggaagcggcccgcatgctcgccgatggggcgtcgcaaaacgaagtggcccgcaccctgggtgttgggcagtccaccatcagcgcccacttccgcggccagggctggacccgtgagcagtccatcgagtgggtttcgttcctccgccgctatcggggtgtcgcatgaccacctggaagaaactcacccctgagcagatcgaacggatcgtgtcgttgacgtgg

SEQ ID NO: 801 - DNA, 260 bp, Artificial Sequence
  Description of Artificial Sequence: Synthetic polynucleotide
caaaatcgccgagcacgagacagtaaaaaaaatagattgagtaataaattgggaaaatgaatattattatttgtttgttataaaattataataaacaaataaataatattaaattaaatggagtgttatgattgtggtagaatgagtactaatattgtactacattataatatcaaatataaaatatatattgaatcagaaaattataataaaaacaaacaccaagattttaaacctatttgtgaaaaatgtgtaatcca

SEQ ID NO: 802 - DNA, 260 bp, Artificial Sequence
  Description of Artificial Sequence: Synthetic polynucleotide
caaaatcgccgagcacgagacagtaaaaaaaatagattgagtaataaattgggaaaatgaatattattatttgtttgttataaaattataataaacaagttaataatactaaattaaatggagtgttatgattgtggtagaatgagtactaatattgtactacattataatatcaaacataaaatatatattgaatcagaaaattataataaaaacaaacaccaagattttaaacctatttgtgaaaaatgtgtaatcca

SEQ ID NO: 803 - DNA, 260 bp, Artificial Sequence
  Description of Artificial Sequence: Synthetic polynucleotide
caaaatcgccgagcacgagatagtaaaaaaattagattgaataataaattggaaaaatgaatattactatttgtttgttataaaattataatgaacaaataaataatattaaattaaatggagtgttatgattgtggtattatgagtactaatattgtactacattataatatcaaacataaaatatatatcgaatcagaaaattataatattgataaacaccaagattttaaacctatttgtgaaaaatgtgtgatcca

SEQ ID NO: 804 - DNA, 260 bp, Artificial Sequence
  Description of Artificial Sequence: Synthetic polynucleotide
gaatgcttgcagtgcggtgaggtgttcgagccggtcacccgcagggcaaggttttgctcgcagaaatgcaagaagcgcgccgcgaatgcgttgcggtcacaaccgtccctgaagatctgcacgcagtgcggcggcgagtttatggggacgtatgcgcagacctgctcgaatgagtgccgacgggcgcagaggtggggcgcatgaccgggcgtgtgctcaccccgatcgaggtggagaaggtggcgtggtggacgcagctg

SEQ ID NO: 805 - DNA, 260 bp, Artificial Sequence
  Description of Artificial Sequence: Synthetic polynucleotide
gaatgcttgcagtgcggtgaggtgttcgagccggtcacccgcagggcaaggttttgctcgcagaaatgcaagaaacgcgccgcgaatgcgttgcggtcacaaccgtccctgaagatctgcacgcagtgcggcggcgagttcatgggcacgtatgcgaagacctgctcgaatgagtgccgccgggcgcagaggtggggcgcatgaccggccgtgtcctgacccccgttgaggtggagaaggtggcgtggctgacccgcatg

SEQ ID NO: 806 - DNA, 260 bp, Artificial Sequence
  Description of Artificial Sequence: Synthetic polynucleotide
gagtgcttgcagtgcggtgaggtgttcgagccggtcacccgcagggcaaggttttgctcgcagaaatgcaagaagcgcgccgcgaatgcgttgcggtcacaaccgtccctgaagatctgcacgcagtgcggcggcgagtttatggggacgtatgcgaagacctgctcgaatgagtgccgccgggcgcagaggtggggcgcatgaccggccgtgtcctgacccccgttgaggtggagaaggtggcgtggctgacccgcatg

SEQ ID NO: 807 - DNA, 260 bp, Artificial Sequence
  Description of Artificial Sequence: Synthetic polynucleotide
gaatgcttgcagtgcggtgaggtgttcgagccggtcacccgaagggcaaggttttgctcgcagaaatgcaagaaacgcgccgcgaatgcgttgcggtcacaaccgtccctgaagatctgcacgcagtgcggcggcgagttcatgggcacgtatgcgcagacctgctcgaatgagtgccgccgggcgcagaggtggggcgcatgaccggccgtgtcctgacccccgttgaggtggagaaggtggcgtggctgacccgcatg

SEQ ID NO: 808 - DNA, 260 bp, Artificial Sequence
  Description of Artificial Sequence: Synthetic polynucleotide
gaatgcttgcagtgcggtgaggtgttcgagccggtcacccgcagggcaaggttttgctcgcagaaatgcaagaagcgcgccgcgaatgcgttgcggtcacaaccgtccctgaagatctgcagccactgcggcggcgagtttatggggacgtatgcgaagacctgctcgaatgagtgccgccgggcgcagaggtggggcgcatgaccggccgcgtgttgactccggttgaggtggagaaggtggcgtggctgacccgcatg

SEQ ID NO: 809 - DNA, 260 bp, Artificial Sequence
  Description of Artificial Sequence: Synthetic polynucleotide
gaatgcttgcagtgcggtgaggtgttcgagccggtcacccgcagggcaaggttttgctcgcagaaatgcaagaaacgcgccgcgaatgcgttgcggtcacaaccgtccctgaagatctgcacgcagtgcggcggcgagtttatggggacgtatgcgcagacctgctcgaatgagtgccgccgggcgcagaggtggggcgcatgaccggccgtgtcctcacccccgttgaggtggagaaggtggcgtggctgacccgcatg

SEQ ID NO: 810 - DNA, 260 bp, Artificial Sequence
  Description of Artificial Sequence: Synthetic polynucleotide
tactactacggcccatacgacaccaaaggtgaagctgaattcatgcttgaaaggaattgaccatgcaatcaccaaactacgcaaggaacgcgcacaaggcagcgcaagcagaaaggcaacacgactaccctatggcggttgtgttttggcaaaaggcagcaaagagcgaatgcacagacaaacaacgccattgggctgagtgtcgctgtcagcactgcaatagatttgtggagatgtgggatgtttaatcaatacgacaa

SEQ ID NO: 811 - DNA, 260 bp, Artificial Sequence
  Description of Artificial Sequence: Synthetic polynucleotide
cgtaaacggaggccggaatataggaaggatgcgtttgttgaggatgatgatttatggtaactgatgtttttttataagaaaatacttaaagatttcatttatacatatatttataataaaatgaaatgttttaattgtgaaactattggttctattcatataaatgacaactatactttgtgttatgattgctttcattttagagatacaattatatctcattcaaatgtgatacatatatatctattgactgatgatga

SEQ ID NO: 812 - DNA, 260 bp, Artificial Sequence
  Description of Artificial Sequence: Synthetic polynucleotide
tatcaacaaatgaacaaaacactgctttacaacgaaacgctcttgaaagcgcaggatgtgagctaatttttgaggacaaggcgagcggcaaaaaggctgaacgccctgggttaaaaaaggttctccgtatgctttccagaggtgacaccctagtcgtatggaagttagatcgtcttgggcgcagcatgcgtcacttagttgtgctggtggaagagctgcgtgacagaggcattaacttccggagtctcactgactccatc

SEQ ID NO: 813 - DNA, 260 bp, Artificial Sequence
  Description of Artificial Sequence: Synthetic polynucleotide
gggagtggggagttatgagtgagtggacgctggtgaaagacaaattaccagaaaaatctgttagagtacgcttgcacatcgaggcaacagggtttactgacggcatgtatctagaaatgagtgatggttcaaaattcttcctgacgtcaatcggtacgtttcatgttgacgatgttaaacgctggagacctctttaaccattgaccataccgtcaaatacgtgtcatactgcatcatattttactactggattagagata

SEQ ID NO: 814 - DNA, 260 bp, Artificial Sequence
  Description of Artificial Sequence: Synthetic polynucleotide
gaagggcaagtcacaatttttgatatcggatgcgaaaacgacatggagaatacatcctaaaaaggtgaagaaaagctcagaagtagtacaggtattatattccataaatagacgatagaatatccttagtaaccaagttactaaggatatttttatttataagaaaaggaggattaatcatcatggaagcaattcaaagtatcgcgggtgaatttgctgtaacaatggcacttggggtcattactcttttggctgcatac

SEQ ID NO: 815 - DNA, 260 bp, Artificial Sequence
  Description of Artificial Sequence: Synthetic polynucleotide
gttctcgcagcgaagcaggcaggagagattgacggaagagagttcagagaagcttgcaacaaagacaacttgttgccaatcagacttgacccgaaaaaagaaatgctcaaggctcccagtgacgattctaaagatgatgagatcgaaacgcgcgaacggacgagcaaggtaaaaccaaaagacgctaaggaggcaaactcatgagtgatgtaatgtggcaacccggtgttacaatcgcagacctggaaaaaggcgcaatc

SEQ ID NO: 816 - DNA, 260 bp, Artificial Sequence
  Description of Artificial Sequence: Synthetic polynucleotide
cgagcgagccggaggagcaggagccggagttcccggcgtatcagttagaggggcttgaaacgctcgtggaggctgacgtcatcaactcccccgagttctggcggcagaagttcggcgagcaggtgacggtcggcgagttgttcggcatcttggggaagctcttcacgaaagcaagcgagtaaggacacggagggcgggacatggaagacctcgtaaaggagctgacgatcgacatggttcctgacggcgacaaccgcatc

SEQ ID NO: 817 - DNA, 260 bp, Artificial Sequence
  Description of Artificial Sequence: Synthetic polynucleotide
actgagcgagacatcctgcggtcggcggccaaatatttcgccggagagacgaattggtgaaccgcttccagttcgtcgcagaccactccgacacctacccggtgaagcggttgtgccaggtcatcgatatcgcccgctcgtcgtactacgcatggatcaacgccgccgagaaacgagccgcccgggccgcagccgacgctgaactcgccgacaagatccgcgccgtccacacggtggacaacacctacgggcggccccgg

SEQ ID NO: 818 - DNA, 260 bp, Artificial Sequence
  Description of Artificial Sequence: Synthetic polynucleotide
tggccatgcattggcatctcctataaatccttatactgaatattgtttggtggatattgaaggatggatattagaaccaggaattataaaagaaccttgtatgtatatgtgttgatattaaattatcataaaaaaaattgaataattaaattataaatattatcagtatcaaataatttatattattttatttgataataatggaaaatcttgatattttagaacttaatgccgctattacgttggtatctttgcgtcgt

SEQ ID NO: 819 - DNA, 260 bp, Artificial Sequence
  Description of Artificial Sequence: Synthetic polynucleotide
gtacacgccatccggtgttattgttttcgaaacaagataacgcttaaagtaagacgttgatggggtggcgctatggtcaaggactggacacccgaagaagacgcgatattgattaccctgtaccgaaacggtatcccgatgcaagagattgcggcacggcttgaccgaaccgaaggctctgttcaaggtcgaattaaccgcaatcgcaagcgctggaaactcatgtcgcgtcaccgctattgttgtttcgaagaacgtgt

SEQ ID NO: 820 - DNA, 260 bp, Artificial Sequence
  Description of Artificial Sequence: Synthetic polynucleotide
acgtggttccaaaataaacgtgctcatgataaacgtttcgaaagcatgaataaaaattgattataatatattaattaaattaacatattataaagattattaatcatattcataataaatggaatgttattattgtgaaactaataaaaataatatatgtttttattattgtctaaaaccaattatttatttagaaagtaaatattacaatccacagattcatgagaattataaaccaatatgtcaagattgcgttattg

SEQ ID NO: 821 - DNA, 260 bp, Artificial Sequence
  Description of Artificial Sequence: Synthetic polynucleotide
caaaatcgccgagcacgagacagtaaaaaaattagattgaataataaattggaaaaatgaatattactatttgtttgttataaaattataataaacaagttaataatactaaattaaatggagtgttatgattgtggtaacataagtactgatattgtactacattataatatcaaacataaaatatacattgaatcaaaaaattataatattgataaacaccaagattttaaacacatttgtgaaaaatgtgtaatcca

SEQ ID NO: 822 - DNA, 260 bp, Artificial Sequence
  Description of Artificial Sequence: Synthetic polynucleotide
ataaaatatcacaatacgaaggaatatttaaagtatatttaagtaaaccatcagaaaaaaaagattatgtggaatattgttttacagataatgaaggatatattttacaaccaggtattaaaagaaaatatcttgattaaaaaattgatattttaaagattagaatagttcatagtaattttaattcataataatccaatatggataaaaagattattattattgatcgcgagaactttgattcttttgaagagaccgca

SEQ ID NO: 823 - DNA, 260 bp, Artificial Sequence
  Description of Artificial Sequence: Synthetic polynucleotide
gaaatattaaaaaaggctaccgcgctcttgatgtcagactccctgaacagttctcgataatcgggaaactcagagcgcattatcctgtggtcacactctgccatgtgttcggggttcatcgcagcagctacagatactggaaaaaccgtcctgaaaaaccagacggcagacgggctgtattacgcagtcaggtacttgagctacatggcatcagccacggttcggccggagcaagaagcatcgccacaatggcaacccgg

SEQ ID NO: 824 - DNA, 260 bp, Artificial Sequence
  Description of Artificial Sequence: Synthetic polynucleotide
taatcaacaaatctggaagatacaacaacttgagaaagagcttggctgggaagataatccgaaacgaatgaaagcattcatgaaaaagtatgctggtgtcgatcggattgaatggcttacacctcaaaaggcttggcgtttgattgagtctcttaaaaagctgacagaaaaagagaatgaagcatagtaggaggtcaacaatggaaaaatggatgcacaaactgaaggtcgaggaccttccggaagtttatcaaaattta

SEQ ID NO: 825 - DNA, 260 bp, Artificial Sequence
  Description of Artificial Sequence: Synthetic polynucleotide
gtaaaacaaatatccatttggtttgccaacagacgcgcttatgatgctagaaaaaattgattataatttgtttatatttataaatgaattataatattgaattatcaatataattatggaatgttattattgcgaaaaaaataaagataatatatgtttttattattgtcttaaacctattttttacatcgaaagtaaaaattatgattcacaattacatgaacaatataaacctatatgtcaggattgcgtatttgaat

SEQ ID NO: 826 - DNA, 260 bp, Artificial Sequence
  Description of Artificial Sequence: Synthetic polynucleotide
gaaatggaacgtgaatttttaaaaaaggcagcagcgtactttgccaaagaaagtcagtaaggtacgcctatatgaaacaaaaaagatattcttttccaattaccttaatggctcgattacttcatgtttcagtttcatgtttttatgattggctcaagagaggcgtgagcaaaagaacgattcaacgaaatcaacagacgatattggtgaaaatagcccatgaggagacaaagcagagctatggttatattcgattaacc

SEQ ID NO: 827 - DNA, 260 bp, Artificial Sequence
  Description of Artificial Sequence: Synthetic polynucleotide
ttgaatctacagcggcgtacttcgcaaagctgtccgactgaggtacgcctttatccgtgacaacacccattgctggcctgtccgactgctttgtcgggtgctggatgtgcatccgagtggtttttacgcctggcttcagcagccggattcacggcggcatcatgctgacctgaggctgacggggctgataaagcagttctggctggagtcgggttgcgtttatggttatcgcaagatccacctcgacctgcgggataccg

SEQ ID NO: 828 - DNA, 260 bp, Artificial Sequence
  Description of Artificial Sequence: Synthetic polynucleotide
gccaggaagtgttacgcaacgatatctcaccaatctttcgcaccactattaatcaatgagttagaggtgattagtgacctgagacagagcattagcgcaaggtgattttttgtccgtaagcgtaaaccgatcgccgtatgtagccattagacaagaattggtaacttagacgcccatctgacacagacggacatctaagtatggaattacaggactggcgaaaagaacctcgtaaaaagtattcgaatgaattcaaactt

SEQ ID NO: 829 - DNA, 260 bp, Artificial Sequence
  Description of Artificial Sequence: Synthetic polynucleotide
acctacgaggtcaatccatccaccatctcccggacgatcggaagggtctaccactcgtgagcactcactacaccgtctcgaaccagcacgaagacctgttcgctcagaacaaggtccgattgaccatcgacgtcaagctcgagaccgcactcgcgctgatcaagcaggctgaggagctggacaagccgaagccgttcgacccgagcgtctactacaccgaccccgacaagatcggcctgcgcgaccccttccgtcgtccg

SEQ ID NO: 830 - DNA, 260 bp, Artificial Sequence
  Description of Artificial Sequence: Synthetic polynucleotide
gatcttgcaatgccgtaactaattccggatccatagacggaatcgtacttccctctgggtgtatctcggccagaagggttataagagtgctctcgctgatgatgggtattttctcttcaacgggttcctttcctttcttcagttttgtcaactgcatttgtgttttctccgcctctaaacgaatcttttcgtgatccataatgaccgacagaacgcggatgaaatggacccccgagcttcacgctatatttatcgacacc

SEQ ID NO: 831 - DNA, 260 bp, Artificial Sequence
  Description of Artificial Sequence: Synthetic polynucleotide
tttattccattgatagatcaatggttttaggttttttgcccatcttttgatatcaaacaaatacccttgggaacttgggtattttttatagcaatggtatcgatttgttgtgacgagagataaggtttgcctgaataggttacactaaactagacagaatttataaagtgttctacactaaagaaaataggagaaccgatatgtctaggaaaatacgtcgccacttcaccgatgattttaagcaacaaattgttgacctt

SEQ ID NO: 832 - DNA, 260 bp, Artificial Sequence
  Description of Artificial Sequence: Synthetic polynucleotide
gaaatgcaattagacattctaaagcaagcggcagtgattatggtacgaaaagggaaataatcactgctaacaaggataaatatagcatttcaaacatgtgtcgttggttgaagattcctcgctctagctattactacaaagctgttaagccagtacctgaagcagaacttggagaaaaaatcaaatctatcttcctccaaagtaagtctaggtacggagccaggaagataaaaaaatgtctggaagtactaggaatcaac

SEQ ID NO: 833 - DNA, 260 bp, Artificial Sequence
  Description of Artificial Sequence: Synthetic polynucleotide
agcgaccctacggtcctcgtgtgggtgatcttgatttcgtcggtgctggcggcggtgacggtgacggtgaactggtgcatgatgactccttgcctcgtggccttccgttctggctggccggtcccccaagcatataacagactgttaggagttgtcaacacctaacccggggttgctttcactaacagagtgttatagacttgcttcagcggggcagccagccgggccgccccctgaacccccgggaaggggtgagcatg

SEQ ID NO: 834 - DNA, 260 bp, Artificial Sequence
  Description of Artificial Sequence: Synthetic polynucleotide
aagttaaattatactttttgccttacaagtataattctactaaataaaattgtacttaaatatagattcaggtagggaacgagtggagaagttaggtcaatgggaaccaatgatatacgcaacgatataaaacctattgacaaaaagggaatctgagcatatcataaagaagtaaacctaataaatatacaataggtagtatgccaaatcaggaaaccttaaaccgcaaaaaagcgcggaaagcggaagtagctagactt

SEQ ID NO: 835 - DNA, 260 bp, Artificial Sequence
  Description of Artificial Sequence: Synthetic polynucleotide
caaaaagcccggatggcacctgacaccaggcgacaaacgtgctcaagcgcaagcggcgttcggggcgcttgtcgtcagtaagggtggaattttcactttcgcgcagagcgttgaggattacgtaacagcggtacagcgttgacaacagcgtcaagtatcatcatactgtcacgaatacacccatcgtaaggatttaagaaatgaacgacactcagacgtcagtactcaacgcagcgatgaagttatcgcgaatccacggt

SEQ ID NO: 836 - DNA, 260 bp, Artificial Sequence
  Description of Artificial Sequence: Synthetic polynucleotide
cgtcttaagatggaagtcgatattttaaagcaagcagcgctgatcatgggacgaaagtaaatgtcatgaagcgtaatcgtgacaaatactcggtatcagcaatgtgcgacgtcctacaaatctctagaagtacgtactattatgaagccaaagagcgtcagaatgaagaccatgtaacccatcatatcgttgaaatctttgagaaaaatcggaaagcatacggtacaagaaagattaaagcaaaacttcatgaacgtagt

SEQ ID NO: 837 - DNA, 260 bp, Artificial Sequence
  Description of Artificial Sequence: Synthetic polynucleotide
ctgcccagaatacgcaaaaatactttggtacgttgaacaaagagatttgtcttattgcacctgacggcacaaaacatgtaactaccaatttgtatcaattttgtaaacaacacggtttgaccccgtcacgtatgagtgatgtaaagaacggcaagtttaaacaacataaaggttggcaagtccaacaggagtaaagattaatgtcacgcgctattaatacgcatgaacctcgtacagctaagatggaagtttcattggtt

SEQ ID NO: 838 - DNA, 260 bp, Artificial Sequence
  Description of Artificial Sequence: Synthetic polynucleotide
cgtcttcaggaggaaaatgaaatcttaaaaaaggctatggccatatttgcgaaaaaatagaaacagacgagctcatcgatgtaattgtagatcttcaagaccaacatgctacacaaactctgtgtagtgtacttggtatacctaaaagcactttttatcaatcgtttaaaaaaacggaatctaatcgtgaatctgaaaacaagcaactaacaaaaagaatcaaagagatccatgaagaaagcaaaatgcgttatggtgcc

SEQ ID NO: 839 - DNA, 260 bp, Artificial Sequence
  Description of Artificial Sequence: Synthetic polynucleotide
tccttcgacgtgaaccgatcaaccatctcccggatcgtccggggcatctaccaccgataggaggcccgatgatcgagcaccggcatgaggtcgcgggtgacgaggttgtcatccgcgtcgtggagaccgaggacgaccttgagggcttccgggacttcatccgggctcatctgggcttcctcggcctggactcggagacgaccggactggacatctacagcgacgacttccgttgccgtactgtccagttcggcactccg

SEQ ID NO: 840 - DNA, 260 bp, Artificial Sequence
  Description of Artificial Sequence: Synthetic polynucleotide
tccttcgacgtgaaccgctcaaccatctcccggatcgtccggggcatctaccaccgataggaggcccgatgatcgagcaccggcatgaggtcgcgggtgaccaggttgtcatccgcgtcgtggagaccgaggacgaccttgagggcttccgggacttcatccgggctcatctgggcttcctcggcctggactcggagacgaccggactggacatctacagcgacgacttccgttgccgtactgtccagttcggcactccg

SEQ ID NO: 841 - DNA, 260 bp, Artificial Sequence
  Description of Artificial Sequence: Synthetic polynucleotide
tccttcgacgtgaaccgatcaaccatctcccggatcgtccggggggtttatcaccgataggagcatccatgatcgagcaccggcatgaggtcgcgggtgacgaggttgtcattcgcgtagtggagaccgaggacgacctggagggcttccgtgacttcatccgggctcatctgggcttcctcggactcgactcggagacgaccgggctggacatctacagcgacgacttccgttgccgtactgtccagttcggcactccg

SEQ ID NO: 842 - DNA, 260 bp, Artificial Sequence
  Description of Artificial Sequence: Synthetic polynucleotide
tccttcgacgttaaccgctcaaccatctcccggatcgtccgggggatctaccaccgataggagagggaattggacatccacatcatgaacgggctggcgagggtcatcgtctcgccacccgagcagccggtcctgatgtctgccgcgttcatggcgacctgggactcactggtcgagtccggtgagaccgagaccaccacggcagccgacttcttcaagaagttcgccgcgaccttcactgatctgctgaaccgctaagg

SEQ ID NO: 843 - DNA, 260 bp, Artificial Sequence
  Description of Artificial Sequence: Synthetic polynucleotide
tccttcgacgttaaccgctcaaccatctcccggatcgtccggggaatctaccaccgataggaggtccgatgatcgagcaccggcatgaggtcgcgggtgacgaggttgtcatccgcgtcgtggagacagaggacgacctggagggcttccgtgacttcatccgggctcatctaggcttcctcggtctggactcggagacgaccggactggacatctacagcgacgatttccgttgccgtactgtccagttcggcactccg

SEQ ID NO: 844 - DNA, 260 bp, Artificial Sequence
  Description of Artificial Sequence: Synthetic polynucleotide
tccttcgacgtgaaccgctcaaccatctcccggatcgtccggggcatctaccaccgataggagaccgatgatcgagcaccggcatgaagtcgcgggtgacgaggtagtcatccgcgtcgtggagaccgaggacgaccttgagggcttccgggacttcatccgggctcatctgggcttcctcggtttggactcggagacgaccggactggacatctacagcgacaacttccgttgccgcaccgtccagttcggcactccga

SEQ ID NO: 845 - DNA, 260 bp, Artificial Sequence
  Description of Artificial Sequence: Synthetic polynucleotide
gaagaggagaaccttatcttaaaaaaagcaagtgccatattcatgcaaaacttaaagtaagactcctcgcttgtctatcggttacgctttgaacacgccacaacaaccttgtgtcgtgttttacgtgtcaatcgctccacttactataaatttctaaaacataagccctcaaaaagagatttggataatcaaatttatagaaaacaaatacttgagatttataccaaagcaaacaaaagacttggtgcgaagtctatcaa

SEQ ID NO: 846 - DNA, 260 bp, Artificial Sequence
  Description of Artificial Sequence: Synthetic polynucleotide
cgtaatttttacgtcagaatacataaatgtattatatattaataatatatacaacatgttatataaatatatgcagagggctttggttgtcctctagcatattatttaaattagttatttgcttcgcaaatatgtctatcgactggagaaaatttttgtttttaactctttagttataaaaactctaccggggtgacaaaatgcgtgaaggaagactatcagttgtctacttgaaagaagaggagaaacagaagagaact

SEQ ID NO: 847 - DNA, 260 bp, Artificial Sequence
  Description of Artificial Sequence: Synthetic polynucleotide
aattggttttataacaaaaaacgcaatgaaaaaaaattgaaaaataatacattagaatagctcattatagttatatttatcattataatcaaagtgtttgattaaattgataacaatgtctatcacttacgacttccaaaacgggattcctactgtcgcccatcacaatctgggttcgaattttcttgctgtaagtaaacaacaagaactttcggcttatcccactcacaccataatcaacatctacatgaatcagacca

SEQ ID NO: 848 - DNA, 260 bp, Artificial Sequence
  Description of Artificial Sequence: Synthetic polynucleotide
aattggttttataacaaaaaacgcaatgaaaaaaaattgaaatataatacattagaatagctcattatagttatatttatcattataatcaaagtgtttgattaaattgataacaatgtctatcacttacgacttccaaaatggtcttctcactgtcgcccatcacaatctgggttcgaattttcttgctgtaagtaaacaacaagaactttcggcttatcccactcacaccataatcaacatctacatgaatcagacca

SEQ ID NO: 849 - DNA, 260 bp, Artificial Sequence
  Description of Artificial Sequence: Synthetic polynucleotide
aatcccgcaaccatctctcggatcgtccgagggatctaccacaccaaaggaggatcatgaacaaccttgagatcgcagagatcgtagagaaggcccacgacgagatggcggcacgaggccgcaccacgggcaacctgatcgacccagagacctgcgaggtctgcctgctcggcgctgtcggcgtggcaggtatcggtgaggaagagctcaagaagaccctctacgaagagttctactacggcggcaagttgcatccggtg

SEQ ID NO: 850 - DNA, 260 bp, Artificial Sequence
  Description of Artificial Sequence: Synthetic polynucleotide
aacccggcaactgtctctcggatcgtccgagggatctaccacgcaaaaggaggatcgtgaacagcaacgagatcgcagagatcgtagagaaggcccacgacgagatggtggcacgaggccgcaccacaggcaacctgatcgacccagagacctgcgaggtctgcctgctcggcgctgtcggcgtggcaggtatcggtgaggagaagctcaagaataccctctacgaagagttctactacggcggcaagttgcatccggtg

SEQ ID NO: 851 - DNA, 260 bp, Artificial Sequence
  Description of Artificial Sequence: Synthetic polynucleotide
aatcccgcaaccgtctctcggatcgtccgagggatctaccacaccaaaggaggatcatgaacaaccttgagatcgcagagatcgtagagaaggcccacgacgagatggcggcacgaggccgcaccacgggcatcctgatcgacccagagacctgcgaggtctgcctgctcggcgctgtcggcgtggcaggtatcggtgaggaggagctcaagaaggcccgctacgaagagttctactacggcggcaagttgcatccggtg

SEQ ID NO: 852 - DNA, 260 bp, Artificial Sequence
  Description of Artificial Sequence: Synthetic polynucleotide
aaccctgcaaccatctctcgactcgtccgagggatctaccacaacaaaggaggatcatgaacaaccaagagatctcagagatcatcgagaaagcccacgatgtcatggtggaacggggccgaaccacgggccagttgatcgacccagacacttgcaaggtctgcctgctcggcgctatcggagtggccggaatcggtgaggaagagctcaagaagacgcactacgacgagttctacgtaggcggcaagttgcgtccggta

SEQ ID NO: 853 - DNA, 260 bp, Artificial Sequence
  Description of Artificial Sequence: Synthetic polynucleotide
aaccctgcaaccatctctcgactcgtccgagggatctaccacaacaaaggaggatcatgaacaaccaagagatctcagagatcatcgagaaagcccacgatgtcatggtggaacggggccgaaccacgggccagttgatcgacccagacacttgcaaggtctgcctgctcggcgctatcggcgtggccggaatcggtgaggaagagctcaagaagacgcactacgacgagttctacgtaggcggcaagttgcgtccggtg

SEQ ID NO: 854 - DNA, 260 bp, Artificial Sequence
  Description of Artificial Sequence: Synthetic polynucleotide
aaccctgcaactatctctcgactcgtccgagggatctaccacaacaaaggaggatcatgaacaaccaagagatcgcagagatcatcgagaatgcccacgatgtcatggtggaacggggccgaaccactggcaagctgatcgacccagacacatgcaaggtctgcctgctcggcgctatcggcgtggccggaataggtgaggaagagctcaagaagacgcactacgacgagttctacgtaggaggcaagttgcgtccggta

SEQ ID NO: 855 - DNA, 260 bp, Artificial Sequence
  Description of Artificial Sequence: Synthetic polynucleotide
aaccctgcaactatctctcgactcgtccgagggatctaccacaacaaaggaggatcatgaacaaccaagagatcgcagagatcatcgagaatgcccacgatgtcatggtggaacggggccgaaccactggcaagctgatcgacccagacacatgcaaggtctgcctgctcggcgctatcggcgtggccggaatcggtgaggaagagctcaagaagacgcactacgacgagttccacgcaggcggcaagttgcgtccggtg

SEQ ID NO: 856 - DNA, 260 bp, Artificial Sequence
  Description of Artificial Sequence: Synthetic polynucleotide
aatcccgcaaccatctctcggatcgtccgagggatctaccacaccaaaggaggatcatgaacaaccttgagatcgcagagatcgtagagaaggcccacgacgagatggtggcacgaggccgcaccacaggcaacctgatcgacccagagacctgcgaggtctgcctgctcggcgctgtcggcgtggcaggtatcggtgaggagaagctcaagaagaccctctacgaagagttctactacggcggcaagttgcatccggtg

SEQ ID NO: 857 - DNA, 260 bp, Artificial Sequence
  Description of Artificial Sequence: Synthetic polynucleotide
acagtactcatgtagaaatcagtttacgtgataataacagtgtgaaacttcaaagtgtagtgatcaaaaatcctaagaatagaaaaaacccaacacgtgtaacattcaataatttacagatagcacagttgactagtttgtctcaagtcgttacaacgtatgtttaatttaaagatttttttatattatccattatataaatggaagtagattatgttacaacgaaagaagcttgtcgaattacaggtttcaaagctcca

SEQ ID NO: 858 - DNA, 260 bp, Artificial Sequence
  Description of Artificial Sequence: Synthetic polynucleotide
aacccggcaactgtctctcggatcgtccgagggatctaccacgcaaaaggaggatcgtgaacagcaacgagatcgcagagatcgtagagaaggcccacgacgagatggtggcacgaggccgcaccacaggcaacctgatcgacccagagacctgcgaggtctgcctgctcggcgctgtcggcgtggcaggtatcggtgaggagaagctcaagaagaccctctacgaagagttctactacggcggcaagttgcatccggtg

SEQ ID NO: 859 - DNA, 260 bp, Artificial Sequence
  Description of Artificial Sequence: Synthetic polynucleotide
gcgattatttatgacgtgggactgtcgacgctgtacagaaaatttcctgcgagatgctgaaaaggtgccgctgcttcgtcgtatgcaagaacgggggcggctgactggcgatcgttcgatagtgcgagtattgaatggttgccagtcgcggcggattctactggttaagaatgactaattaatgtgtttaatctgaaaccaggcatctgttcaacttttcgtgatcgcttttgttggcatcactattcaagcagtttgcc

SEQ ID NO: 860 - DNA, 260 bp, Artificial Sequence
  Description of Artificial Sequence: Synthetic polynucleotide
ttaatgttaagcaagcctgtgatgacttacttgtgccacctgcaggtataaggcgtgccatagttggacgtcaagccacctcgcacggttacagatgggctaaacaaactccgacatgcaaagctcaggttagaaaccgtttagacgaactgagggccaataaggagctctcagaacaatttgattatttggactagattatgaaaagcagagaatttaaatcaatcgtgtttggatgcgaacctcaatacgaaattgaa

SEQ ID NO: 861 - DNA, 260 bp, Artificial Sequence
  Description of Artificial Sequence: Synthetic polynucleotide
taatcttaaactacttagcttatcgtaaattagttaataatgttggtaattatgatgacgcaatcgaaatgtaccacaacaatattacccataattatttggatgtatactataaaagtagacaaaactttgtgtgttataatctattttaaaagacacaaaaacgaaaggacaacctatgtcaacatttaaacgctacgatgaagaatttaaacaatcccttgtcaacctttatcaaactggaaaaaactcagtctgaa

SEQ ID NO: 862 - DNA, 260 bp, Artificial Sequence
  Description of Artificial Sequence: Synthetic polynucleotide
ttggtatacagatattaagaatcgcttcagcaatggcgatgtaattacggtcgatgtggctaataccaaaacttatttcaatggcagtgaagatcgccctttgcatacattaggcaacctggatgtaagttgattcctgagacaacttttaagagagggtataatgaataaatcgtctctcaaaaggaaggaatttttacatgacaagtcgttacgacaaagaattcaaacaaaacattatcaacctatataagcaaggc

SEQ ID NO: 863 - DNA, 260 bp, Artificial Sequence
  Description of Artificial Sequence: Synthetic polynucleotide
gcgtacgacgtgaaccccgcaaccatctctcggatcgtccgagggatctaccacacctaaaggaggatcatgaacaaccttgagatcgcagagataatcgagaaggcccacgacgagatggtggcgcgaggccgcaccaagggcgatctgatcgacacagagacctgcaaggtctgcctgctcggcgctgtcggcgtggccggtatcggtgaggaagagctcaagagaacgcactacgacgagttccgcaacggcggcaa

SEQ ID NO: 864 - DNA, 260 bp, Artificial Sequence
  Description of Artificial Sequence: Synthetic polynucleotide
gcgtacgacgtgaaccccgcaaccatctctcggatcgtccgagggatctaccacacctaaaggaggatcatgaacaaccttgagatcgcagagatcatcgagaaggcccacgacgagatggtggcgagaggacgcaccacgggcaatctgatcaacccagagacctgcgaggtctgcctgctcggcgctgtcggcgtggccggtatcggtgaggaagagctcaagagaacgcactacgacgagttctactacggcggcaa

SEQ ID NO: 865 - DNA, 260 bp, Artificial Sequence
  Description of Artificial Sequence: Synthetic polynucleotide
gcgtacgacgtgaaccccgcaaccatctctcggatcgtccgagggatctaccacacctaaaggaggatcatgaacaaccttgagatcgcagagatcatcgagaaggcccacgacgagatggtggcgcgaggccgcaccacgggcgatctgatcgacaccgagacctgcaaggtctgcctgctcggcgctgtcggcgtggccggtatcggtgaggaagagctcaagagaacgctctacgacgagttccgcaacggcggcaa

SEQ ID NO: 866 - DNA, 260 bp, Artificial Sequence
  Description of Artificial Sequence: Synthetic polynucleotide
ttacaaaaacgtaatgcgcagcttgaagaggagaaccttgaatcggttacactaaactagacagaatttataaagtgttctacactaaagaaaacaggagaacagatatgtctagaaaaatacgtcgccacttcaccgatgattttaagcaacaaatcgttgacttgcacaatgcaggtagaaaacgcagtgaactgatcaaagaatatgatttaacgccctcaaccttcgataagtgggtcagacaagccaaactaacg

SEQ ID NO: 867 - DNA, 260 bp, Artificial Sequence
  Description of Artificial Sequence: Synthetic polynucleotide
ttgacaccaatccaaattaaaaattggttttataacaaaaaacgcaatgaaaaaaattgaaaaataatacattagaatagctcattatagttatatttatcattataatcaaagtgtttgattaaattgataacaatgtctatcacttacgacttccaaaacgggattcctactgtcacccatcacaatctgggttcgaattttcttgctgtaagtaaacaacaagaactttcggcttatcccactcacaccataatcaa

SEQ ID NO: 868 - DNA, 260 bp, Artificial Sequence
  Description of Artificial Sequence: Synthetic polynucleotide
aaaatgcttgggattagtcgctcggggttgggtggtattttgaagagggtgggcagatgaaatataaaataggtgaagctaatggaaaaaattaacaagtatctaatgtattatgcagtaatagtatcatgcactggcatcacggctatggtttttgttgttttgcaatacttaggaagggtgtgtaaatgaaattcaatttggataggacggattatattttatatccagaatcaatatacaagatcgaggttagactt

SEQ ID NO: 869 - DNA, 260 bp, Artificial Sequence
  Description of Artificial Sequence: Synthetic polynucleotide
aagaccgccccggcctgacccgtcttctggacaaggcccgcgagggcgacaccgtggttatctggcgctttgaccgtctggcccgctccaccgtcgatctgctgggcttggtcgatgacctccagaagcgcggcatccaccttcgctcccttcatgagggtatcgacacctctggggcaactggccggttcttcctcaccatgttcggtgctctgggtgagttcgagcggaacctgatgattgagcgtgtcaacgccggt

SEQ ID NO: 870 - DNA, 260 bp, Artificial Sequence
  Description of Artificial Sequence: Synthetic polynucleotide
aagaacgttgatataattcatccacagaattaaagctgctttattttcatcactgataattcccaacgttaattctgtgcgccagtccttaatagcattacctgcatcgttaagtaatttcgggtggtttcggccttagcctgacaatccaccgaaacgggtaaaatcttaccatccctgtatcaccaggagccatcaccatggcaatcatcagggcagtctgcagcgtccacttccgcgccggacttgccgctgcgagg

SEQ ID NO: 871 - DNA, 260 bp, Artificial Sequence
  Description of Artificial Sequence: Synthetic polynucleotide
gacaccctggtcgtatgggcgttagatcattttgcgggcagcagcgttacttggttgtgatgttggaaaatgaggtcttacagcgaattgatttcatctcacctcctttacatcaattcgccactatcgaaaaaaacatcgtgggttgagtgtggctattggggcacaatcaatctgtgttgccgaccgattcaattggtttgagcgttactttctatgcacgttcgtttggcggggtgttttttatacaaagttgacag

SEQ ID NO: 872 - DNA, 260 bp, Artificial Sequence
  Description of Artificial Sequence: Synthetic polynucleotide
gttccgtttgttgctgaccgccgtcagggttcgcataagaaggagtcgaacaatgactgacaagtgcgagacggtaggatgcgataacgacgctgagttttttgacgggctgcacaacaaaatatgctccgactgtatggatatggagattgcagaatccgaatgtgaagctgaagactttatgacgattgaggactaaccatgctatcaccaaactactcaaggaacgcgcacaaggcagcgcaagcagaaaggcaaca

SEQ ID NO: 873 - DNA, 260 bp, Artificial Sequence
  Description of Artificial Sequence: Synthetic polynucleotide
gttccgtttgttgctgatcgccgtcagggctcgcataagaaggagtcgaataatggctgaatggattggtgtgcacgagcaagctccacctctagacgctgcatttgacatatgggttgactatcaagatttgacaggaaggctttgcaattgcttttacaaccataataataataaatattggtactgggacgataagtgtaagaataaaattcaactttacgcttcatatgtaacacactggatgccactaccgcctc

SEQ ID NO: 874 - DNA, 260 bp, Artificial Sequence
  Description of Artificial Sequence: Synthetic polynucleotide
gtgccgtttgttgctgaccgccgtcaaggtgcgcataagaaggagtcgaataatggctgattggattagcgtgcacgagcagatgccacctgtagatgttgcttttgacttatgggtagattatcaagatatgacgggaagaatgtgcaactgcttctacagccctaaaaacaataaatattggtattgggacgaatcttgcaagaataagatccagttttacgcatcatacgcaacacactggatgccactgccgcctc

SEQ ID NO: 875 - DNA, 260 bp, Artificial Sequence
  Description of Artificial Sequence: Synthetic polynucleotide
gtgccgtttgttgctgaccgccgccaaggtgcgcataagaaggagtcgaataatggttaatcacaaattaagcgaatggtttggcttgagttactcatcattctgcgtaatgcctcgcgtgcttatggaggatatgccggacgagtggcaagaaaaaatggcagaactgctaaatcagtatgacgatgcattcgatcagtcaaaagttggtattgatggatgcagagttcaagcaactatggataacaagttggttaaga

SEQ ID NO: 876 - DNA, 260 bp, Artificial Sequence
  Description of Artificial Sequence: Synthetic polynucleotide
gttccgtttgttgctgaccgccgtcaaggtgcgcataagaaggagctgaataatggctgattggattggtgtgcacgagcaagctccacctctagacgctgcatttgacatatgggttgactatcaagatttgacaggaaggctttgcaattgcttttacaaccataagaataataaatattggtactgggacgataagtgtaagaataaaattcaactttacgcttcatatgtaacacactggatgccactaccgcctc

SEQ ID NO: 877 - DNA, 260 bp, Artificial Sequence
  Description of Artificial Sequence: Synthetic polynucleotide
gttccgtttgttgctgaccgccgccaaggtgcgcataagaaggagtctaataatggctaacttaaagcaccaagatatcattgatgagttttatcgactcgcaaagcttaagtttgaatggatggatgacgagatgatggagaagattgaagaagtcactggcattactccagaaaaactgaactctgacatagaaaccggagttagaaatggcatatctccaagtctgcaacttgttttaatgaagcagcttttacact

SEQ ID NO: 878 - DNA, 260 bp, Artificial Sequence
  Description of Artificial Sequence: Synthetic polynucleotide
acgctattaatataacataccatgatttgagattgataagatatcgggttttaaccttagtttaataaattggaagatttttgtatgaagatttgctaccgtattttcgtgccatagctatctgaaacgatagtttttacttggttagggggggcttaaaattacatttttgaataagtattttatacttcttatacgatatgtttttattgtattgcagggggacaggggagattggcgggcgaagaccaaagttatca

SEQ ID NO: 879 - DNA, 260 bp, Artificial Sequence
  Description of Artificial Sequence: Synthetic polynucleotide
atgacagctagacagactaacgtgccgttacactcagtgctaaatgctgaaggcgtactaaacaaccagcttgcagttggtatcgtgaagatggcgtatagcttaccagttatgcatagcgagaaaaataagctgattgtcacaaaccagttcggcagcaagatcatgatgatgtgccttgagaatgtggagatttaacaatgcaaacccaaaacaacgttcgcacaactaacatcgaagtagcaacaatcaaagacgca

SEQ ID NO: 880 - DNA, 260 bp, Artificial Sequence
  Description of Artificial Sequence: Synthetic polynucleotide
aagttaatggcttttgttgctgaccgccgtcaggggcatcataagaaggaaggtaagtgatggttaattggattggtgtggaagaaaaactaccagaagttaacgaacctgtactgtgcgttggtatgtgtggcgatggtgactttctagctcctgttgtcgcagcgcttcaggatgatggtaagtttattgttggttatagatttgatggagatagagctataggttttttcattgaaacatttgttactcactggatg

SEQ ID NO: 881 - DNA, 260 bp, Artificial Sequence
  Description of Artificial Sequence: Synthetic polynucleotide
gcctctgcggcttctagtgggatttgtacattcataagtattagtcctgagtttaatgctccccaccacaatggctaaaagggacaggacagcccgaggagcttgttaagtataaccacatcaaaataattaaacaaatgccttgattttattcaatgtgatgattaagattaattcaacttaaacaggaaaggataatcatgaaatttacagacacaaaaacaaccaccattgatgaagtgttaattaacactcgtggc

SEQ ID NO: 882 - DNA, 260 bp, Artificial Sequence
  Description of Artificial Sequence: Synthetic polynucleotide
ggaaagctagtaccatttgttgctgatcgccgtcagggtgcgcataagaaggctagttgaccatgcaatcaccaaactactcaaggaacgcgcacaaggcagcgcaagcagaaaggcaacacgactaccctatggcggttgtgttttggcaaaaggcagcaaagagcgaatgcagcgataaacaacgccattgggctgagtgtcgctgtcagcactgcaatagatttgtaggggattgggatgtttagcaaaaagagccg

SEQ ID NO: 883 - DNA, 260 bp, Artificial Sequence
  Description of Artificial Sequence: Synthetic polynucleotide
ggaaagcttgttgtttttgttgctgaccgccgtcaaggtgcgcataagaaggccaattgacatgcaatcaccaaactacgcaaggaacgcgcacaaggcagcgcaagcagaaaggcaacgcgactaccctatggcggttgtgttttggcaaaaggcagcgaagagtgaatgcacagacaaacaacgccattgggctgagtgtcgctgtcagcactgtaatagatttgtggagatgtgggatgtttaataaattatctgcg

SEQ ID NO: 884 - DNA, 260 bp, Artificial Sequence
  Description of Artificial Sequence: Synthetic polynucleotide
ggaaagcttgtaccgtttgttgctgaccgccgtcagggtgcgcataagaaggccagttgaccatgcaatcaccaaactactcaaggaacgcgcacaaggcagcgcaagcagaaaggcaacacgactaccctatggcggttgtgttttggcaaaaggcagcaaagagcgaatgcagcgataaacaacgccattgggctgagtgtcgatgtcagcactgtaatagatttgtggagatgtgggatgtttaaccaagcaagcaa

SEQ ID NO: 885 - DNA, 260 bp, Artificial Sequence
  Description of Artificial Sequence: Synthetic polynucleotide
ggaaagcttgttccgtttgtcgctgaccgccgtcagggttcgcataagaagggcaattgaccatgcaatcaccaaactacgcaaggaacgcacacaaggcagcgcaagcagaaagggcacacgactaccctatggcggttgtgttttggcaaaaggcagcacagagcgaatgcacagacaaacaacgccattgggctgagtgtcgctgtcagcattgtaatagatttgtggagatgtgggatgtttaatcaatacgacaa

SEQ ID NO: 886 - DNA, 260 bp, Artificial Sequence
  Description of Artificial Sequence: Synthetic polynucleotide
ggaaagttaatggcttttgtcgctgaccgccgtcaagggcatcataagaagggcaattgaccatgcaatcaccaaactactcaaggaacgcgcacaaggcagcgcaagcagaaaggcaacacgactaccctatggcggttgtgttttggcaaaaggcagcacagagcgaatgcacagacaaacaacgccattgggctgagtgccgctgtcagcactgtaatagatttgtggagatgtgggatgtttaattatttaaaagc

SEQ ID NO: 887 - DNA, 260 bp, Artificial Sequence
  Description of Artificial Sequence: Synthetic polynucleotide
ggcaaattagtcccgtttgttgctgaccgccgtcaaggtgcgcataagaaggccagttgaccatgcaatcaccaagctactcaaggaacgcgcacaaggcagcgcaagcagaaaggcaacacgactaccctatggctgttgtgttttggcaaaaggcagcaaagagcgaatgcagcgataaacaacgccattgggctgagtgtcgctgtcagcactgtaatagatttgcaggggattgggatgtttaatcaagcaagcaa

SEQ ID NO: 888 - DNA, 260 bp, Artificial Sequence
  Description of Artificial Sequence: Synthetic polynucleotide
aacccggcaactgtctctcggatcgtccgagggatctaccacgcaaaaggaggatcgtgaacagcaacgagatcgcagagatcgtagagaaggcccacgacgagatggtggcacgaggccgcaccacaggcaacctgatcgacccagagacctgcgaggtctgcctgctcggcgctgtcggcgtggcaggtataggtgaggagaagctcaagaagaccctctacgaagagttctactacggcggcaagttgcatccggtg

SEQ ID NO: 889 - DNA, 260 bp, Artificial Sequence
  Description of Artificial Sequence: Synthetic polynucleotide
gatggaaagcttgttgtttttgtcgctgaccgccgtcaggggcattttaagaaggcttagcaaatggaatcaccaaactacgcaaggaacgcgcacaaggcagcgcaagcagaaagggcgcacgactaccctatggcggttgtgttttggcaaaaggcagcacagagcgaatgcacagacaaacaacgccattgggctgagtgccgctgtcagcactgtaatagatttgtggagatgtgggatgtttaatcaatacgaca

SEQ ID NO: 890 - DNA, 260 bp, Artificial Sequence
  Description of Artificial Sequence: Synthetic polynucleotide
gatggaaagcttgttgtttttgtcgctgaccgccgtcagggttcgcataagaaggcttagcaaatgcaatcaccaaactactcaaggaacgcgcacaaggccgcgcaagcagaaagggcgcacgactaccctatggcggttgtattttggcaaaaggcagcacagagcgaatgcacagacaaacagcgccattgggctgagtgtcgctgtcagcactgtaatagatttgtggagatgtgggatgtttaatcaagcaagca

SEQ ID NO: 891 - DNA, 260 bp, Artificial Sequence
  Description of Artificial Sequence: Synthetic polynucleotide
ttaaattcggtgctatatgtaagtgtttgtttttattgcttctttttgcatcgaattgacgaatcgaaaattcggcagtctgtatagtttgtgatatttgagtgattttcagcatccaaaaactgtgatttacgtcactgacgaatcaatcgtcgtttttgtagaatgaatcgacaacaacaaaaccaataggaacaaccatgctaaaaacaaaatcaattcaggtttgcactgtggccgatgttttggtgaagactcgc

SEQ ID NO: 892 - DNA, 260 bp, Artificial Sequence
  Description of Artificial Sequence: Synthetic polynucleotide
ttagttcgcgtcgagattcacggcgattttgaggaaaagctaacggtgattaatcattagtgtgaggcctgtcactgaatcaaaaaccaataacgcttaaattacctaaaaaacacaaggtgattaatatggaatacaaaggaaacataacgctacctagttactcagagttttgcgagtcaattgtgtcttctgcggcaaagtctaacgaaaaggttagatgcaaagaatgtgatggaagtggcgagattgaagaggat

SEQ ID NO: 893 - DNA, 260 bp, Artificial Sequence
  Description of Artificial Sequence: Synthetic polynucleotide
gtccgacgtgcgggcgtggtggccggcatgccacgaccacgaggaggacccaacgtgaccgtcgtcggcatcttgggggcggccgcgttctcggccatcatcggcgccgctggctacagcgtgtggtggctcaacgagaaacgcaacgcccgaccccaggaacacaacaccatcaccggcaccggtcaggagatcccccgatgacaaccaccgcgccggcggcgaccaccctcaccgccgaccaaaccaccaccgcgcga

SEQ ID NO: 894 - DNA, 260 bp, Artificial Sequence
  Description of Artificial Sequence: Synthetic polynucleotide
atgaccactgcggcaattttcgatgatgttgtctatccgctgcatttcgacaatgccggcaaggtcaggcaagaaatggaaggcgctgttaactggttctgcaggtggcgcaacgaagagaaagccgttgtgaaagcgagattgttggtcagttgctggggtcaatatctgagccatgagcaggttatccgggaggccgcatgacacacactatcaaaaccattccagacatgctcattgagacatacggaaaccagaca

SEQ ID NO: 895 - DNA, 260 bp, Artificial Sequence
  Description of Artificial Sequence: Synthetic polynucleotide
atgaccactgcggcaattttcgatgatgttgtctatccgctgcatttcgacaatgccggcaaggttaggcaagaaatggaaggcgctgttaactggttctgcaggtggtgcaacgaagagaaagccgctgtgaaagcgagattgttggtcagttgctggggtcaatatctgagtcatgagcaggttatccgggaggccgcatgacacacactgtcaaaaccattccagacatgctcatagagacatatggaaaccagaca

SEQ ID NO: 896 - DNA, 260 bp, Artificial Sequence
  Description of Artificial Sequence: Synthetic polynucleotide
atcattaatgggacggcgctgtcaggctcctctatatcggattatgtctcggcattcggagacagaaaaatgatatctgaatgggcgaaagacgagagatgcacagtcacagccaaaaccattctaaggcgaattctttcaggcattccgcctgaacaagctatttcctccaaaagaagaccagatatccgggaggccgcatgacacacactatcaaaaccattccagacatgctcatagagacatatggaaaccagaca

SEQ ID NO: 897 - DNA, 260 bp, Artificial Sequence
  Description of Artificial Sequence: Synthetic polynucleotide
aggaatatcttaatgataagtgagctacaggcatttcacctgatggtgaagcacagcatgattatcatccactgtgaccgggataaattagtgtttaccgatgacctgcagtataccgaacagtggtctgataagtttgataaacccaaagccacatgtcgtttaatcgaacgtgtagcgcgtgacagaggtgaacagttatgaaagcaacagtgcatactatttatgaattattaccatctacccgtggtaacattact

SEQ ID NO: 898 - DNA, 260 bp, Artificial Sequence
  Description of Artificial Sequence: Synthetic polynucleotide
gaccgcggcgacgccggcgtggcttggggtcgtgccgcgtgcgctgtctgtcgtggcgctggccaactcggtggccgtgacatcactgctggtggccgctgctcgcagcccggccgtatcgacttctagtccgtttgccatgccaatcccccaaccggcaatctcctggttgtgagcgtacctcagcgttgctgagcgacgtgacgcgagaatatgcgacatggccgccaattcgggctggtcagccgcgcctcgagttc

SEQ ID NO: 899 - DNA, 260 bp, Artificial Sequence
  Description of Artificial Sequence: Synthetic polynucleotide
atgaccactgcggcaattttcgatgatgttgtctatccgctgcatttcgacaatgccggcaaggttaggcaagaaatggaaggcgctgttaactggttctgcaggtggtgcaacgaagagaaagccgctgtgaaagcgagattgttggtcagttgctggggtcaatatctgagtcatgagcaggttatccgggaggccgcatgacacacactgtcaaaaccattccagacatgctcatagagacatacggaaaccagaca

SEQ ID NO: 900 - DNA, 260 bp, Artificial Sequence
  Description of Artificial Sequence: Synthetic polynucleotide
atgaccactgcggcaattttcgatgatgttgtctatccgctgcatttcgacaatgccggcaaggttaggcaagaaatggaaggcgctgttaactggttctgcaggtggtgcaacgaagagaaagccgctgtgaaagcgagattgttggtcagttgctggggtcaatatctgagtcatgagcaggttatccgggaggccgcatgacacacactatcaaaaccattccagacgtgctcatagagacatatggaaaccagaca

SEQ ID NO: 901 - DNA, 260 bp, Artificial Sequence
  Description of Artificial Sequence: Synthetic polynucleotide
acttgaatcagcacccaaaggcgctacccattattttcttgtgccaaatggatctggtgagccttattttgttcttgaaaaagaaaagaagttttactggttccacggtcaggatgaaataactaagccacacattttaagttggattaagccaattgaatcactgaaagaagttaaagcggaaagtaaggaggggtgaaatgacaaaaacatccatagatcaagaaattgacgaagctatagccaaaggtggaagcttt

SEQ ID NO: 902 - DNA, 260 bp, Artificial Sequence
  Description of Artificial Sequence: Synthetic polynucleotide
aaaatgcttgggattagtcgaacggggttgggtggtattttgaagagggtatgtagatgaaaattgatgaaattatttgggcgcaatgtcgcggattccaagtttatgggaaaacaaaacatggaataaaaaaatacaattattctggtcttatatcggctggttttggtattcataaattcacagatgaagacggaagcaagtattttgtaaaagttaattcatacaatgatagtttaatgactataaacccttgggat

SEQ ID NO: 903 - DNA, 260 bp, Artificial Sequence
  Description of Artificial Sequence: Synthetic polynucleotide
aagatgcttgggattagtcgaacggggttgagtgggattttgaagagggtgagtagatgaaatttaatttagataaaacggattatattttatatccagaatcaatatataagagcaaggttagatttacgctatttgttggtgtgtattgggtttggtgcttgttatggcttggtgttgctttatacaatattgttgttaatcacaattatgctgatggattaatttcaggtgtaattcatattttatgtttatttatg

SEQ ID NO: 904 - DNA, 260 bp, Artificial Sequence
  Description of Artificial Sequence: Synthetic polynucleotide
aagatgcttgggattagtcgaacggggttgggtggcattttgaagagggtgagtagatgaaatttaatttagataaaacggattatattttatataccgagtcgatgtataagagcaaagttagatttacgctatttgctggtgtgtattgggtttggtgtttagtttggtttggcattgctttatacaatattgtagtgaattacaattatattgaaggtttgatttcaggtgtgattcatattttatgtttgtttatg

SEQ ID NO: 905 - DNA, 260 bp, Artificial Sequence
  Description of Artificial Sequence: Synthetic polynucleotide
atgcggaggaatatctaaataatgaacggtgaacaggcttttgacattctggtaaaatataacattatcgttattcattgtgaccgtgatcagattgttttcactgatgatctgcgttatgaagaaccttatgacggtgataaacgatcagcaacgttaagactgattgaacgtgtagcgcgtgacaaaggtgaacagctatgactcatactattcatgaattattacccactacccgtgggaacatcactgaattagcc

SEQ ID NO: 906 - DNA, 260 bp, Artificial Sequence
  Description of Artificial Sequence: Synthetic polynucleotide
gagcgtaacgggcaatataatttatttacaaatatcagcgagcaatacggcaatggataaaaaatcaaagcaaatctacgacgcagtttttaaaaacgtgcatctaacgagtagtaagaaagcggctgaacaccttggcttaacatcaactgaaatatccagggcagcgcgtaagcattcgattatcagcgaaacaatacgccgtaataagattaagcagggtggcgcttatgctagagcgttttcgttgatgcctgtga

SEQ ID NO: 907 - DNA, 260 bp, Artificial Sequence
  Description of Artificial Sequence: Synthetic polynucleotide
aacttgtaaaaaggaaaacaaataatgtctaatggaaaagtaaatatctaccatgcttggaaaatgttcctattgtttgaaaataaaacagtgaaagaggttacctcaattattgaaacttttgaaaattttcttcataataatgagccagaaaaagcgcaagaatttttagataccttatttgaaaaggaaaacaagtaatgagggattttaaccttaaagaagaaacaagaaagtttcaaaaatctttaatagaacaa

SEQ ID NO: 908 - DNA, 260 bp, Artificial Sequence
  Description of Artificial Sequence: Synthetic polynucleotide
aacggtcgtaccgtgaatgcaattaggcaaaagtactatagtattttaaattgcaggtaacgtacttgtatatggtgcgttgacgataggaaatgcattatatacggtgttacctggcgaagtgaacagttattattaaaagaaaaaaagcgatggcaaattatttttgcaaaaaataaaatatgtatgattgatataaggttgagtgataatttagagttaatggcagaaatgcaagataatacagtagatttaattta

SEQ ID NO: 909 - DNA, 260 bp, Artificial Sequence
  Description of Artificial Sequence: Synthetic polynucleotide
tgtttgatagtcatggcttatgaggtggaaggtgatggggtgatggggagtgttgtctcagatagggatctcaatctgctcatcttggttctgaaggtaactgttcgaggggtaaggggtcaacaagggaaacctgttcgacttgatacatacatattcgggaaggctgtgcttgtcaacatcagaacagggcggtttgtatgaatggataccccaaaaggatcagaaatcagatactcgcccttcatgaacaagggatg

SEQ ID NO: 910 - DNA, 260 bp, Artificial Sequence
  Description of Artificial Sequence: Synthetic polynucleotide
tgctgatccggagaataatcttccggcacaaaatagcgatacaccttagcctcaaatggtgatgagacgtatagcacgtcaccgccgtttccaggggcagcgccctggcagaaatggagcgcgagctgatcgtcgagcgtacccgcgccggtttagccgcagcgagggagcaggggagagtaggtggacggcgccgggtaatgaccactgaggttgtggagcgatgccgcaggatgttgggtacgggcgcaacccggcag

SEQ ID NO: 911 - DNA, 260 bp, Artificial Sequence
  Description of Artificial Sequence: Synthetic polynucleotide
ttgatgctaaaaggcaagcaacgcttcttctatctgcacgtcattattgctactaaattctgtaagaagctaccacaccatactcaagttaatcataaagatggcaataaattgaataacgctaaagataacttagagtggtgtactgctagcgaaacatactgcacaaataccatggagacatacaaggagatattactttgtactctaagatgaaagaactaagagctgtaggaatgacctataagcagatagcacag

SEQ ID NO: 912 - DNA, 260 bp, Artificial Sequence
  Description of Artificial Sequence: Synthetic polynucleotide
gagtggcgggggatgcggcgcatgcacgagcacagcgggaacgcgatgtttctgagttgagaggtccggggcgcgcctggccgcgcgaccccggtttgaggcgggccaaaaggcccacggacgggagcgaaaatgacacaagaacacaggctttacaactctgttgcgccgctgaggaacgtctcggcgctcgtgacactgatcgagaaggtgcgcgaccgcgcgcccggtttgccggggatggcgacattctcgggcta

SEQ ID NO: 913 - DNA, 260 bp, Artificial Sequence
  Description of Artificial Sequence: Synthetic polynucleotide
gcgaaatccgcgaccgaagcccgccgccatatcgcgcatgaagagggcaaagccccggcgccagtcaacccgacggacaaggcgtatcaggcgcttgccgaggcttggaggcgggcgccggcggcggctcggcggcggttcctggaggagttcggccaggacgtgtcggagctgatgccgaagccggaggtcgccgccgaatgacgctgaccccgaccaaggaatggtggaccgccgccgaaatcgccgcccaggcactg

SEQ ID NO: 914 - DNA, 260 bp, Artificial Sequence
  Description of Artificial Sequence: Synthetic polynucleotide
ggggcaggcccccgcgccgatgtcgccgaccgatcaagcctatacgcgtctgctcgacgcctgggaccgggcgccgaaggcggcgcgcaagcggttccttgaagggcggggcgatgccgtgcgcgaggtgctggacgatctggacgcggcttcgggcgctgagaacaccgtcaccttcctgccgcggagggacgagcgccatggctgagaccccgcgccaggaatggtggagcgcggccgagatcgccgcagcgggcctg

SEQ ID NO: 915 - DNA, 260 bp, Artificial Sequence
  Description of Artificial Sequence: Synthetic polynucleotide
tcaagcaattgcaaaagaattagatgtaagcactgattacctcctaggcaattcgaattctacagtgtctgatgcacacgacctaaaaaagttcctagatcaaaacatgatattatttgacggtattccactgactgaggaagagatatctaggattaaaggatatcttgatgcactgatttctaggggaggtaagtaagatgttctctaattcccttgaggatttctttggtccggaagttgacatttatgcaagggta

SEQ ID NO: 916 - DNA, 260 bp, Artificial Sequence
  Description of Artificial Sequence: Synthetic polynucleotide
aatttctgttatatatacaaaaaattattgcgacctacaagaaatacaagaattaaaacatattctatctcaaatgattatacataacttaaaaaacaaaaagaagaatgacgagtaatgttgtcattcttctttttttagattaatatttacatagataataaaatttatcgacaaagataataaaaagggtgagaaatatgtcagataaaaaacaagatatttatgctatttatattcgtgtatcaactgaacgacaa

SEQ ID NO: 917 - DNA, 260 bp, Artificial Sequence
  Description of Artificial Sequence: Synthetic polynucleotide
agtggcgcgaagtggactggagccaggagaagcgcacccgcttcaccacgctgctcctgcgtcttctggcagaggatgacgaggacaccgaggagtgatagacggtggtccgactgtcacaaagtaggttagatttacatacagtcccacggaggcatcccggccaaggggtgcctccgttctgtgttaaggagacatcggtgagcaacactcttctgccggggcagagactgcgtcgtcgcatacgcgtcgccatctac

SEQ ID NO: 918 - DNA, 260 bp, Artificial Sequence
  Description of Artificial Sequence: Synthetic polynucleotide
gcgggtggcgccgtgagcaacacgacctccgcctggaggacgagagagtggagcgaggccgagcgtgctcgcctcttccgtctcctcttcgggtcacaaacacagacgaaaactgggtgagtcaggtacactgacacaccgcacagcaacccctcgggctgatgctcggggggttcgtgcgttcaggggagggaagtgtcatggtgaagcgaactcttccgcgtcagcggatgaagcaggcgaccgtccgggtcgccatc

SEQ ID NO: 919 - DNA, 260 bp, Artificial Sequence
  Description of Artificial Sequence: Synthetic polynucleotide
gcgggtggcgccgtgagcaacacgacctccgcctggaggacgagagagtggagcgaggccgagcgtgctcgcctcttccgtctcctcttcgggtcacaaacacagacgaaaactgggtgagtcaggtacactgacacactgcacagcaacccctcgggctgatgctcggggggttcgtgcgttcaggggagggaagtgtcatggtgaagcgaactcttccgcgtcagcggatgaagcaggcgaccgtccgggtcgccatc

SEQ ID NO: 920 - DNA, 260 bp, Artificial Sequence
  Description of Artificial Sequence: Synthetic polynucleotide
agccagagccccatcgtcagcgtcgagtggcgcagaaccaagtggaccccggcccagcgcgagcgcctggcccgcatcctcctcgggccggtagcgaagaaggactgacccaggtacagttacatacggcgtgcacgcccctcgacccatgcggtcggggggcttcgtgcgtcctgctacctgagtccgaggggggacacatgcgaaccacgaccctgccgcgcaagcgcaagatgctgcgcgtcgccatctacctgcgc

SEQ ID NO: 921 - DNA, 260 bp, Artificial Sequence
  Description of Artificial Sequence: Synthetic polynucleotide
ggtggcgccgtgagcaacacgacctccgcctggaggacgagagagtggagcgaggccgagcgtgctcgcctcttccgtctcctcttcgggtcacaaacacagacgaaaactgggtgagtcaggtacactgacacaccgcacagcaacccctcgggctgatgctcggggggttcgtgcgttcaggggagggaagtgtcatggtgaagcgaactcttccgcgtcagcggatgaagcaggcgaccgtccgggtcgccatctac

SEQ ID NO: 922 - DNA, 260 bp, Artificial Sequence
  Description of Artificial Sequence: Synthetic polynucleotide
ccagaaccccatcgtcagcgtcgagtggcgcaaggccaggtggaccccggccgagcgcgaacgcctcgcccgcatcctcctcggacccgtcgccaagaaggactgacttcagctacagttacatacggcgcgagacgccccccgagccttctggccggggggcttcggcgtttctgtgtaagtggaactggagggggaccatgcgtaccaagacactgcctcgcaagaccaagacgctgcgggtggccatctacctgcgc

SEQ ID NO: 923 - DNA, 260 bp, Artificial Sequence
  Description of Artificial Sequence: Synthetic polynucleotide
gaatatctgaatcattcgctggatattctggaacagaacagacgtaaaaaagccatttaattaacgtttaaacaaaatttaattacgaggttattcagatgaatatttccgatattcgcgcaggactgcgcacgcttgtagaaaatgaagaaaccacctttaaacaaattgctcttgagagcgggctttctaccggaactatcagtagttttatcaatgataagtacaacggggataacgagcgtgtttcacaaatgctg

SEQ ID NO: 924 - DNA, 260 bp, Artificial Sequence
  Description of Artificial Sequence: Synthetic polynucleotide
gctgaattaaagaaacgaaaaatttcattacgttctttagggagacagaacggactttctcctcatacattaaaaaatgctttagataaatcctaccgaaatggcgaaatcattatcgcaaaggcgttgggaatgaagcctgaagatgtgtggccttcacgatatcaatcttttcataacgcagcttaagtgggtgggttatgactaattggtttacgacaaaagaattggttggacttccagggttgccagagcactct

SEQ ID NO: 925 - DNA, 260 bp, Artificial Sequence
  Description of Artificial Sequence: Synthetic polynucleotide
gaatatctgaatcattcgctggatattctggaacagaacagacgtaaaaaagccatttaattaacgtttaaacaaaatttaattacgaggttattcagatgaatatttccgatattcgcgcaggactgcgcacgcttgtagaaaatgaagaaaccacctttaaacaaattgctcttgagagcggactttctaccggaactatcagtagttttatcaatgataagtacaacggggataacgagcgtgtttcacaaatgctg

SEQ ID NO: 926 - DNA, 260 bp, Artificial Sequence
  Description of Artificial Sequence: Synthetic polynucleotide
gaatatctgaatcattcgctggatattctggaacagaacagacgtaaaaaagtcatttaattaacgttttaacaaaatttaattacgaggttattcagatgaatatttccgatattcgcgcaggactgcgcacgcttgtagaaaatgaagaaaccacctttaaacaaattgctcttgagagcgggctttctaccggaactatcagtagttttatcaatgataagtacaacggggataacgagcgtgttttacaaatgctg

SEQ ID NO: 927 - DNA, 260 bp, Artificial Sequence
  Description of Artificial Sequence: Synthetic polynucleotide
ttcgagcaaggctggcggaaaggtcttgaaatgattaaacaggaaaagggcattaaataggagaaatcaaatgagcttaattaaccaaatcaatgcaattaaagcatcaggaaatattagtcaacgtgatattgcacagcaaattggcatttcagcaggtgcattgagtgcttatttaaagggtaattatgcaggcaatatcgacaacatcgagagtgcactcacgaactggcttgcgacacaagaaaagaaagaaaaag

SEQ ID NO: 928 - DNA, 260 bp, Artificial Sequence
  Description of Artificial Sequence: Synthetic polynucleotide
gccttgagccagagccccatcgtcagcgtcgagtggcgcaagaccaagtggacccccgccgagcgggaacgcctcgcccgcatcctcctcgggccggtggcgagtaagacctgaccccaggtacagttgcacacggcgcctacgccccccgagccttctggccggggggtttcggcgtatctggatccaggagggggatcatgggagccaagacgctcgcccgcaagcgcaagaccctgcgagtcgccatctacctacgc

SEQ ID NO: 929 - DNA, 260 bp, Artificial Sequence
  Description of Artificial Sequence: Synthetic polynucleotide
aagtacggattcaacgatgcgatggaaagacacctgaagaagttcaaaggcgaggcatgaaaaaacccgggagcggcaactcccgggctcaaagtggccctcaggccaatcactactcagaaaggcaaggataacacatgacaaaagagcagcgaaaaaccatgaaagccaaacgcaacgaagccctggcggatgccgtcgaacagatcattgccgatgagagcttgacccaggcctcggtttccaagctgaccaacatc

SEQ ID NO: 930 - DNA, 260 bp, Artificial Sequence
  Description of Artificial Sequence: Synthetic polynucleotide
cataaagataagcttcttttgaattcatctttcactatgaatttaaaagaagaatatcaagctgatctattcgctacttacatgtatatgaactataaagatataaatcaatctaaggatatatgtatttaccctaaaagaatatcagaacttaaagaaaaattttaactaagatattgaaattactaggaggtttatatatgaaaactgtcgctatatatagtagaaaatctcgttttactggtaaaggtgattctatt

SEQ ID NO: 931 - DNA, 260 bp, Artificial Sequence
  Description of Artificial Sequence: Synthetic polynucleotide
cagaacttcagccaaagcgtttcaaacctgtttgaacagaaattcaaaaacaagctttaaaccctatttaaaccttccataaatggagattgatatgagtacaaacgtagttgaactaggcaatgcagaggctaagcaaaccgacacattaatgcgcattcgtgcattaacagaatcgaaggctgtttcagcgtctcagattgcaaaagagatcagcgtatcacctgccacgctaagccaaattttgaacggttcataca

SEQ ID NO: 932 - DNA, 260 bp, Artificial Sequence
  Description of Artificial Sequence: Synthetic polynucleotide
gaagatttaaatataagtttggacaatgataagcaagttgagtgtgttgtattgatgtaaaaagttgcacccactaagtaaataaagtgtagaaaataagggcttattctaaggctatcgttaaaaggtatcggtagcttggagtaagccttattagttgagagaaaataaggttgagtaggaacatatctatagatgagagttgacactagggaatggataacaagaaaaaatgcacccacttgcacccagctaaaaat

SEQ ID NO: 933 - DNA, 260 bp, Artificial Sequence
  Description of Artificial Sequence: Synthetic polynucleotide
ccgaaggtcgaggaagagacggagccggagacgctgaacgggttcacagcggcggcgtgacggcggcaccagcgcaacgggaaggggcttcggccccttttctcgtgcccggcgtcggttcgttgccctaagcaactgttcctagcgtcacgtcagcgccggaccggcaggcttcccacctgggcaaagagacgtagtgacggagttacgtcacttctgaattcctataagacatctctataagcaatccggaagtgacg

SEQ ID NO: 934 - DNA, 260 bp, Artificial Sequence
  Description of Artificial Sequence: Synthetic polynucleotide
atccattgggcaaagccgtctgaagacgcccaggaagagccggagacgctagcggcgtagctgggcacccccggagcctgtacggcgctcagacgggcgctcagcgggcttctcagggcagcgggaagggtcggccggatcgccggtcggccttctctcgtgtctcgtggtcgttagttagcctaagtaacagtgactccgtcaccacagcacagcggggcgccccgtctgacctgggcaaagtgatgaagtgacgtagt

SEQ ID NO: 935 - DNA, 260 bp, Artificial Sequence
  Description of Artificial Sequence: Synthetic polynucleotide
ccgccgaccgacgacgacgaagacgacgcccaggacggcacggaagacgtagcggcgtagcgagacacccgggaagcctgttaggcgctgagacgggcgcacagcgggcttcctggggcagcgggaagggtcggccggtcccccggtcggcccatttctcttgtctcggtttagttagttagcctaagtaacagtgactccgtcaccacagcacagcggggcgagccgttgacctgggggaagtgatgctgtgacggaat

SEQ ID NO: 936 - DNA, 260 bp, Artificial Sequence
  Description of Artificial Sequence: Synthetic polynucleotide
atccgacagttttttgattttggcaaagatatccgaccattcgctcgtagtcatacggcatggctcctttctcaaatttactgtcggcagcaactgaattatatcaaatacgcacccgcttttcagggattcgtagaattataccgaaaatcggaaaaatattgcgaattttgaagaagataatcgtgaggtgatggttgatggcccgaaaaaagaatattgctgcgggtcagaatgccgtcatttatgcccgctattcc

SEQ ID NO: 937 - DNA, 260 bp, Artificial Sequence
  Description of Artificial Sequence: Synthetic polynucleotide
ctgctgaaggaggaagacgaagcgagcgaagccactgagcgggagcttgcggcgctgtagcgcacagcgggaggggtcgagccggcggacggttcggccccttttttggccttgaaatcgttagttaggctaactagtagttccttcgtcaccacagcgggcagggagcgcccttctgacctgggatgagtgacgtagtgacgaaatgactcatacctaggattcacataagcattctctataggtaatccggactcgac

SEQ ID NO: 938 - DNA, 260 bp, Artificial Sequence
  Description of Artificial Sequence: Synthetic polynucleotide
aatacgaggccgccggtggaggagatggtgcgtatcgtgttcggtcctgtggggggatgatgggatggatttccccgcgccttgtggcttggggaaatccatccagggggttatgtgaaatctgttcgcagaatttcgcgttctggggtgcggttcagaacgagaccgtgatcagcaaaaattcgagttaatgaggcgatctcgccggcgttgaggtgttcacctatggcgtgggagatctcccgacaggtagtgccctc

SEQ ID NO: 939 - DNA, 260 bp, Artificial Sequence
  Description of Artificial Sequence: Synthetic polynucleotide
ccgattgaagagcgcgtcacgatcgaatgggcgaagccggcggaggggtcagcggcgtaagcccacagcgggaagggggccgatccttcggggtcggtcctctttttgtgccttcggatcgttagttaggctaagtagttatcatcccgtgaccactcccctacacgagcccccttgagaatccccttcctgacctgggcttgtgcactagtgcagatttgtacttgatcttgataccaccatagaaaagctatagagaa

SEQ ID NO: 940 - DNA, 260 bp, Artificial Sequence
  Description of Artificial Sequence: Synthetic polynucleotide
ccgattgaagaccgggtcaagatcgaatgggctaagccggcggaggggtcagcggcgtaggggcacagcgggaaggggtccgatccttcgggtcgggcctctttttgtgccttcggatcgttagttaggctaagtagttatgatcctgtgacactctcctgcacggcttcgcctgagaatcccctacctgacctgggctaatgctctagtgcagatttgtacttgatcttggaaacacaatagaaaagctatagagaaac

SEQ ID NO: 941 - DNA, 260 bp, Artificial Sequence
  Description of Artificial Sequence: Synthetic polynucleotide
tcgcaacgcgtctcggccgaccagctcaccaacgccgataacgccggctacatgcgcgccctcgaccacgtcgcgcgcggcctgctcgacgtaccccccgcaccgcgccgcggtggcaaccgggaccgcgacgagcaggtcgcgggcaacgtgatcacactgcgcccgcacaaccccgaccgatgcgaacggaaggcacagtgagcactctgtatctaccgccccagtaccaggggccgccggatgccggcgacctctgg

SEQ ID NO: 942 - DNA, 260 bp, Artificial Sequence
  Description of Artificial Sequence: Synthetic polynucleotide
gttccgattgaagagcgcgtcaagatcgaatgggcgaagccggcggagtcagcggcgtagcccaggacagcgggaaggggtccggtccttcggggtcggacctctttttgtgccttcaagtccttagttaggctaactagttatccttccgtgacactctcctacacgagcccccgtgggaatccccttcctgacctgggcttgtgcactagtgcagttttgtacttgatcttgataccaccttagaaaagctatagaga

SEQ ID NO: 943 - DNA, 260 bp, Artificial Sequence
  Description of Artificial Sequence: Synthetic polynucleotide
ccggaaacggttgtgttccgcaatgggctgtcccatacattcacttataaggattcttaatgtaaaaatacccaggagcatttacactcctgggtttctctttgtcccattatttacttttcctgatttctgggataacctcacatttgttagatttggaggctacacaatcatcatagcatcccgtatgattacgggtgtaccaccatttctaacatttgttagatttttactggttctcggaatgctcatatgtattc

SEQ ID NO: 944 - DNA, 260 bp, Artificial Sequence
  Description of Artificial Sequence: Synthetic polynucleotide
cataaagaaacccccacatgtggaggctattgtgttgctcatcaaatagtagcgaagtaaaaaagtgagacgcaaatttgagcgtctcactctttttttatttcaagatatcatttaaggactcagtgattgtaggatgagtatagatacgatcacacaacacacgataatcgagttttaaatccatggcaagcgttattaagttaatcatttcatgggattcaatcccaaagagagaagcaccaatgatttgatttgtg

SEQ ID NO: 945 - DNA, 260 bp, Artificial Sequence
  Description of Artificial Sequence: Synthetic polynucleotide
agaggaaacttaaataacaaaataaatacccttttaatatacacagaaggcattctatagctaacttaagtaaccagatataactataacttttattgtttaataacatttgtgccattctctctaacttgagcttatggtttaaagtacttaatgaccaagagcataattattactacaaataggtggtcttaggctttcaagatgactatttactttcagcaaatcgtccaaatcatgctctattttttgtgttttta

SEQ ID NO: 946 - DNA, 260 bp, Artificial Sequence
  Description of Artificial Sequence: Synthetic polynucleotide
cagatcaccgacgaccagctcgccgaagcgcaccaggccggctacgcgctggccctccaccacgttgcgcgcggcctgctcgtcccggacccggccccgccgacccccggccaccaccaggacgacgagcagaccccgggcaacgtggtgcaactgcaccgcagcccgaccaacacccccaaggagaaacggaaggcacagtgaccagcctgtacgtacccccggcgtccgccgccctgcgcggcgaactgccctgggtg

SEQ ID NO: 947 - DNA, 260 bp, Artificial Sequence
  Description of Artificial Sequence: Synthetic polynucleotide
tatgctgcaaaagctggacccataccttgcagactatggcagcatccgtgatgccgttgtcgattccctgaatgtgtaccccccccccgacattttgcatagtttctatcattcctttttgtgcataacagaaaagcagccccgcactacgcacggagctgctttttcttcagctatcattatcttctggaggtttcgcaatgggctatgtgacgaagaaggcggcgcaacgctttgaggaaaagaaagccgccatatac

SEQ ID NO: 948 - DNA, 260 bp, Artificial Sequence
  Description of Artificial Sequence: Synthetic polynucleotide
cagatcaccgacgaccagctcgccgaagcgcaccaggccggctacgcgctggcccttcaccacgttgcgcgcggcctgctcgtcccggacccggccccgccgacccccggccaccaccaggacgacgagcaggccccgggcaacgtggtgcaactccgccgcagcccgaccgacacccccaaggagaaacggaaggcacattgaccagcctgtacgtcccgccgtccttcacgggcggcccgccgcccgatgacctcccc

SEQ ID NO: 949 - DNA, 260 bp, Artificial Sequence
  Description of Artificial Sequence: Synthetic polynucleotide
acgcggaatttcttacgggctggtttagctgcgctagccatgtcgataatcctgttgagtggtttctgtacggccatgatggcagagcgtaacttgctgtctcaacgaggttttgttgtcggaggaaggccagaccataaagggggcgatagcgggatcgcgcgcggggtaatcttcactccataaacggtggagggcagatgatacaggacacttttgtacgtcagagggcaaaacaactttactggcagggctacccg

SEQ ID NO: 950 - DNA, 260 bp, Artificial Sequence
  Description of Artificial Sequence: Synthetic polynucleotide
gaccacgcgtaccgcgccggataccaccgcgcgctcacccacgtgtcacaaggacttctcgacgccccggcggcaccgccggacggcggcgaggaagtcgggcagtacgacgcgcagggcaacgccctatgcgacgacgacctgctcgacaatgtgcggccactccggccgcacggaaacgccaacccacggaaagcggtatgaaactagacataccaagcacattccacggctcgcgcacatttggcgagccgtggctc

SEQ ID NO: 951 - DNA, 260 bp, Artificial Sequence
  Description of Artificial Sequence: Synthetic polynucleotide
cacgagagggtcaagatcgagtggcatcggcccacggaggaggtagacctggtggcgtaggccacactgtacacacgagagggtctctgctcacatgagcgggggccctttcttcttgccctttaggtcacggaacggtaacggccccgtgggcccgggtgacgttcggcggggccgatgacgctcagcgggcggggacggggctcccgcaccccctctgacctgcaagaatgatggcagtgacgattgagatagtgatc

SEQ ID NO: 952 - DNA, 260 bp, Artificial Sequence
  Description of Artificial Sequence: Synthetic polynucleotide
gacccgacacccatagaagaccgactcattttcgattggctgagcggggtgccagcgtgactacgcgaacgtgttaccggtgcaaggaagtcaagccgctggaagagttcccccgggcggcaagcaagcccaaagggcatgactacctgtgtaagccgtgcaaggtggtggttgagtctgagcggaagcgacagacgccgggcttgcaggcggaagcgtcccgggctcagcgggcaggcatcaggctcaacaagtgcgct

SEQ ID NO: 953 - DNA, 260 bp, Artificial Sequence
  Description of Artificial Sequence: Synthetic polynucleotide
cgcctcgccctcgaacacgtcgctaagggcctgctcagcaggaaatccgcaccgcccgacggcgggacacgcgtcgagccagtcgacgaccgcgcgaccctcgaccccgacctcggcggcggagccgcgggccccgttgtccccagcaacgtgcgcccgctccggctcatccgccacgaccacgacgaacggaagatcgtatgacccttcccgacatcccacccacgttccacggctcggcgcacgccggcgagccgtgg

SEQ ID NO: 954 - DNA, 260 bp, Artificial Sequence
  Description of Artificial Sequence: Synthetic polynucleotide
ctcgccctcgaacacgtcgctaagggcctgctcagcaggaaatccgccccgccggacggcgggacgcacgtcgagccggtcgccgaccgcgccactctcgacggcgaccgcgccgccggcggaaccgcggggcccgttgtccccaacaacgtgcacccgctgaggctcatccgcccagaccacgacgaacggaagatcgtatgacccttcccgacatccccgctacgttccacggttcgcccctcgcgggcgagccgtgg

SEQ ID NO: 955 - DNA, 260 bp, Artificial Sequence
  Description of Artificial Sequence: Synthetic polynucleotide
aatcaactaaaaaggctgtgaaacagctcctagagttaaatttaataaataatgttgaagatctatttaaaggtcagtatgaaccaggtactttagaggaattattaattacagctttaaaagcagatatatcatatttactcaataatgaaaaataaagtttttttatttataaatatagtatgaaagggatgttaaatgtgaagaaatcagctatatacataagagtttccacgcatcatcaaatcgataaggattcg

SEQ ID NO: 956 - DNA, 260 bp, Artificial Sequence
  Description of Artificial Sequence: Synthetic polynucleotide
gacctcgatccctcgctcatcccaagcgacgggctgccgatgcttcctctcgacgcctgatactctcgcctaggcgggtcgttcgaccaagctggttcgccagtcgccaacgaacccgaaggtaggtgctggcttcgattccgaaaaccagaaatccgtgaaagcagcgacgtctggcgcaaggtaccaatacgcgtgcccgtcagcatccatagcccaccatcgagcgcttttcggcgcctgcttccagtcgatctcag

SEQ ID NO: 957 - DNA, 260 bp, Artificial Sequence
  Description of Artificial Sequence: Synthetic polynucleotide
ccgagggatgacgacatgagaggggccctcggaatgacaggagcccccctggccgattagaggtcaaccagggaggcgtgcaaccacacggatctaaggagcagttgcatggcaatcgtaaccccgtcgcgtgcggcgacggcaggcacaatcgcggtcggtgggctctcgttcgcgctgtcgttcacggcgctgagagagctgtcggcggccaacggagtggcccaggcatggatggtgcccctggtggtcgacggagg

SEQ ID NO: 958 - DNA, 260 bp, Artificial Sequence
  Description of Artificial Sequence: Synthetic polynucleotide
agttacgaatgaagaatatataaatactcgcgaagattttaaaagttttaaattggcattagagcaacttataaatctaaaaatgattacttcagctgaagatttatttaaggattttaaaggtaatgcagctgaggaattgcttgttgctgcacttaaagctgatgttgaaggtataatgttaaaaaaggagaatacaaatgaaaaagatgaaaattaaaatagcaatctatgtaagggtatccacacaccatcaagta

SEQ ID NO: 959 - DNA, 260 bp, Artificial Sequence
  Description of Artificial Sequence: Synthetic polynucleotide
aacgagttcttcgcccagggcgctgaagagcttgagggcatcgcacgcgccgaagcgtgacagcggaaggggtcgttccttcgggggcgaccccatttcgtgcgccttgagattgttagttaggctaactagtagttccttcgtcacgacagcgggcagggatcaggcttctgacctgggagaagtgatgttgtgacgctgtgatccaaactcaggattcacataagagcttctataggcaatccggatcttgagccact

SEQ ID NO: 960 - DNA, 260 bp, Artificial Sequence
  Description of Artificial Sequence: Synthetic polynucleotide
aggctcaggtcatctgcgtgtgctcgcgaaaccgcactgagcatcatcgcaaattcgactttcactgcacggcgccacgcggcgccgtttttttatgcccggctttcgcgcgcggagaaatatacattcgttgtgtcaggggcagcctagtgatatgaaatgtatacttttcgcttttgtcatgttactcaggcagcaccgtgcaggaaaaacccaaagtttacagctacttacgtttcagcgatccgaagcaagctact

SEQ ID NO: 961 - DNA, 260 bp, Artificial Sequence
  Description of Artificial Sequence: Synthetic polynucleotide
ccgagggatgacgacatgagaggggccctcggaatgacaggagcccccctggtcgattagaggtcaaccagggaggcgtgcaaccacacggatctaaggagcagttgcatggcaatcgtaaccccgtcgcgtgcggcgacggcaggcacaatcgcggtcggtgggctctcgttcgcgctgtcgttcacggcgctgagagagctgtcggcggccaacggagtggcccaggcatggatggtgcccctggtggtcgacggagg

SEQ ID NO: 962 - DNA, 260 bp, Artificial Sequence
  Description of Artificial Sequence: Synthetic polynucleotide
ccgaaggacgttcggactcgcctggtcattcggccagacgacttcggacagaccttctgagaacgcaaaaagcccccagtcgatgagtgactgggggctctgcgttacagcttgctcgggtcgtacgggatctcctcgtcaccgtcgatgatgacgacctcgatctcgatcacggggcgacgcgaccgtgccgctggaacgcgccccaggtgaggggcatgtcctgatggaggaagtcctccatcttctcggcggccatc

SEQ ID NO: 963 - DNA, 260 bp, Artificial Sequence
  Description of Artificial Sequence: Synthetic polynucleotide
ccgaaggacgttcggactcgcctggtcatacggccagacgacttcggacagaccttctgagaacgcaaaaagcccccagtcgatgagtgactgggggctctgcgttacagcttgctcgggtcgtacgggatctcctcgtcaccgtcgatgatgacgacctcgatctcgatcacgggccgacgcgaccgtgccgctggaacgcgccccaggtgaggggcatgtcctgatggaagaagtcctccatcttctcggcggccatc

SEQ ID NO: 964 - DNA, 260 bp, Artificial Sequence
  Description of Artificial Sequence: Synthetic polynucleotide
gaccacgcgtaccgcgccggctaccaccgcgcgctcacccacgtgtcgcaaggacttctcgacgccccggcagcaccgccggacggcggagaggaagccgggcacgacccgcaggggacctgcaccccgtgcgacgacccgctcggcaacgtgcggccgatccggccgcacggagaggacatcaacccacggaaagcggtatgaaacgagacctaccaagcacgttccgcggctcccgcacgccgggcgagccgtggctc

SEQ ID NO: 965 - DNA, 260 bp, Artificial Sequence
  Description of Artificial Sequence: Synthetic polynucleotide
gaccacgcgtaccgcgccggataccaccgcgcgcttacccacgtgtcacaaggacttctcgacgccccggcggcaccgccggacggcggcgaggaagtcgggcagtacgacgcgcagggcaacgccctatgcgacgacgacctgctcgacaatgtgcggccactccggccgtatgaaaacaccaacccacggaaagcggtatgaaactagacataccaagcaccttccacggctcgcgcacattcggcgagccgtggctc

SEQ ID NO: 966 - DNA, 260 bp, Artificial Sequence
  Description of Artificial Sequence: Synthetic polynucleotide
ccgaaggacgttcggactcgcctggttattcggccagacgacttcggacagaccttctgagaacgcaaaaagcccccagtcgatgagtgactgggggctctgcgttacagcttgctcgggtcgtacgggatctcctcgtcaccgtcgatgatgacgacctcgatctcgatcacggggcgacgcgaccgtgccgctggaacgcgccccaggtgaggggcatgtcctgatggaagaagtcctccatcttctcggcggccatc

SEQ ID NO: 967 - DNA, 260 bp, Artificial Sequence
  Description of Artificial Sequence: Synthetic polynucleotide
ccgaaggacgttcggacacgcctggtcatccggccagacgacttcggacagaccttctgagagaacgcaaaaagcccccagtcgatgagtgactgggggctctgcgttacagcttgctcgggtcgtacgggatctcctcgtcaccgtcgatgatgacgacctcgatctcgatcacggggagacgcggccgtgccgcatgaaggcggaccaggtgatgggcatcgcgtcggcgaagacctcctccatctcgtcggccacca

SEQ ID NO: 968 - DNA, 260 bp, Artificial Sequence
  Description of Artificial Sequence: Synthetic polynucleotide
ccgaaggacgttcggacccgcctggtcattcggccagacgacttcggacagaccttctgagacaacgcaagaagcccccagtcgagaggtgactgggggcttcgttgttagagcttgctcgggtcgtacgggatctcctcgtcaccgtcgatgatgacgacctcgatctcgatcacggggccactcggccgtgccgctggaacgcgccccaggtgtggggcatgtcgtgctggaagtagtcctccatcttctcggcggcc

SEQ ID NO: 969 - DNA, 260 bp, Artificial Sequence
  Description of Artificial Sequence: Synthetic polynucleotide
agccctcctggatttataaagtatttacaatgaatttagatgaactaattataacccatgttcaagaaggtttttcataaaatttcaatcaattcaattccttcaaattattgtattgttttcgtattcaatgtcagataaaatattcttaattaagtttctgttttgacattaaacacaaataaagaggtgctaaatttttggagttaaaaaacattgttaattcttacaacatcacaaatattttagggtatcttaga

SEQ ID NO: 970 - DNA, 260 bp, Artificial Sequence
  Description of Artificial Sequence: Synthetic polynucleotide
caaccgaaagcggaccaaccccagccctcatttcaacttcaactttttggttcacagaatgattgagccaaagcaccgcgacgcatggaaggccagacgatgacgcacgccgatccacggttacttgcatttgtccgagctttggcgaaagctgatgcgcgtcgcgatagggcgctggcagcggcaaatagtgaggaagtatgcaaaacaacagagcagccatttatgcgaggttctcaactgatctccaaaacgagcgg

SEQ ID NO: 971 - DNA, 260 bp, Artificial Sequence
  Description of Artificial Sequence: Synthetic polynucleotide
ccctgggcggaggagccggacgccggggaggactacggcggggagacagcggcagagtgagtatttattgagaattgtttgaccttctaatccagctatacgcctcctctcctcctctctacagcgtcaccagccaggtcaaacagttctccttatcgcccctcaccaggggaggttctctccggacccccaggtgaggggcgacgtgcgtcccagggaggagacacccccgatgacctacgaagaggagtgcgcacact

SEQ ID NO: 972 - DNA, 260 bp, Artificial Sequence
  Description of Artificial Sequence: Synthetic polynucleotide
ccgaaggacgtgcgtcagcgcctggtcatccggccggacgactttggcgacacgttctgacccagaacgcacgaaagcccccagtcgagtgatgactgggggcttcgttgttagagcttgctcgggtcgtacgggatctcctcgtcaccgtcgatgatgacgacctcgatctcgatcacggggccactcggccgtgccgctggaacgcgccccaggtgtggggcatgtcgtgctggaagtagtcctccatcttctcggcg

SEQ ID NO: 973 - DNA, 260 bp, Artificial Sequence
  Description of Artificial Sequence: Synthetic polynucleotide
ccgaaggacgtgcgtcagcgcctggtcatccggccggacgacttcggcgacacgttctgacccagaacgcacgaaagcccccagtcgagtgatgactgggggcttcgttgttagagcttgctcgggtcgtacgggatctcctcgtcaccgtcgatgatgacgacctcgatctcgatcacggggccactcggccgtgccgctggaacgcgccccaggtgtggggcatgtcgtgctggaagtagtcctccatcttctcggcg

SEQ ID NO: 974 - DNA, 260 bp, Artificial Sequence
  Description of Artificial Sequence: Synthetic polynucleotide
ccgaaggacgtgcgtcagcgcctggtcatccggccggacgacttcggcgacacgttctaacccagaacgcacgaaagcccccagtcgagtgatgactgggggcttcgttgttagagcttgctcgggtcgtacgggatctcctcgtcaccgtcgatgatgacgacctcgatctcgatcacggggccactcggccgtgccgctggaacgcgccccaggtgtggggcatgtcgtgctggaagtagtcctccatcttctcggcg

SEQ ID NO: 975 - DNA, 260 bp, Artificial Sequence
  Description of Artificial Sequence: Synthetic polynucleotide
tctcctgtctggcgtacgactgccggacgcggcgagcctcagctctctgccgttcagtgaagctgggcatggtggcccgagcctgagccacccactcctctcgggtcacccgatccgctcctcgttgagcatccggctgatctcgtcgcggaggtgatcgttctcggctgcctcacggaggagcaggaggcggaggtcaccgatgactccttgcgcccacacggggagcttcttcgtgcgctcggagtcgaacagcttgg

SEQ ID NO: 976 - DNA, 260 bp, Artificial Sequence
  Description of Artificial Sequence: Synthetic polynucleotide
ataaaattcattccatagttctagatgaaaatagatataaacgtattagatctgcattaatgaaaaaggaagtctcatataatagttgtgaaatatagtattttccctactactttttaataaatatatgtagttatactcaattaacttaacttatttataaaactacaatcaatgtataaacactttggaggtatactatgaaagcagctatttattcaagaaaatcaaaattcactggtaaaggtgaaagtgtagaa

SEQ ID NO: 977 - DNA, 260 bp, Artificial Sequence
  Description of Artificial Sequence: Synthetic polynucleotide
gccaatggcaagcgcgccattgtcaccctgcgcgccggaaagtggcgcgccgaaccctgaaggactgtctatgtattacgaaaacaagtcgtatcttatcggatgcttggggcaggaccccgagattcggacattccagaacggcggcaaggtggcgaacctgcgcattgccaccacccgccggtggaagtccaagaacacgggcgaggtgcaggaagaaaccgaatggcattcggtcgctgtgaccaatgaggcccttg

SEQ ID NO: 978 - DNA, 260 bp, Artificial Sequence
  Description of Artificial Sequence: Synthetic polynucleotide
gccaatggcaagcgcgccattgtcaccctgcgcgccggaaagtggcgcgccgaaccctgaaggactgtctatgtattacgaaaacaagtcgtatcttatcggatgcttggggcaggaccccgagattcggacattccagaacggcggcaaggtggcgaacctgcgcattgccaccacccgccggtggaagtccaagaacacgggcgaggtgcaggaagaaaccgaatggcattcggtcgttgtgaccaatgaggcccttg

SEQ ID NO: 979 - DNA, 260 bp, Artificial Sequence
  Description of Artificial Sequence: Synthetic polynucleotide
caaattgttgcagttatagcgaacggagaagaaggatcgttgaagcgcatgagatggagcgaaggttctccatatatagaattaataccggaaaattccgaatataatattatgagacatctccctcatgaaatcatagtctgcggagtgtatgtgggacactttaaaccagactttagagcagataaggagtcttgaaaatgagtaatgaatattgtatgtatcttcggaaatcacgagctgatgcagaggcggaagcg

SEQ ID NO: 980 - DNA, 260 bp, Artificial Sequence
  Description of Artificial Sequence: Synthetic polynucleotide
ctgaggctgggcgcggctctatacctcgtaaacgcagaaaagccccctacgggccgctagggctcgcagagggcttctccggtagtctctattcagttgtactgctgagtccgtcagcgtgggcgctagaggggtttatggggcctcgtggacccgcacgtacggctgcagaggcttgtcacggtaggcgtggtagcgctctttctcgtcggagatcgacttgagaagctcgctgtcgatatgctcccgcacgaccttca

SEQ ID NO: 981 - DNA, 260 bp, Artificial Sequence
  Description of Artificial Sequence: Synthetic polynucleotide
tacgagcagcatctcaggctcggtagcgtggtcgaacggctacacgccgggatgtcgtagagcgactaccccgagaacgcagaaaagccccctacgcgccgtgtaagggcacgcagagggctctctggtagtctctattcagttgtggggttgcgtccgtcagcgtggacgctagaggggtttacggggcctcgtggatccgtacgtacggctgcagaggcttgtcacggtaggcgtgatagcgctcggcctcctcgacg

SEQ ID NO: 982 - DNA, 260 bp, Artificial Sequence
  Description of Artificial Sequence: Synthetic polynucleotide
tacgagcagcatctcaggctcggcagcgtggtcgaacggctacacaccgggatgtcgtagagcggctacccggagaacgcagaaaagccccctacgcgccgtgtaagggcacgcagagggctctctggcagtctctattcagttgtggggttgcgtccgtcagcgtggacgctagagggtatttcggggtggtgcagcatgtccggtgacttgtccgagtagcagatggagctgcctaggtgagcaacccatcgaaaccc

SEQ ID NO: 983 - DNA, 260 bp, Artificial Sequence
  Description of Artificial Sequence: Synthetic polynucleotide
ctgaggctgggctcggctctagacctcgtaaacgcagaaaagccccctacgggccgctagggcacgcagagggctctctggtagtctctattcagttgtactgctgagtccgtcagcgtggacgctagaggggtttacggggcctcgtggacccgcacgtacggctgcagaggcttgtcacggtaggcgtggtagcgctcggcctcctcggcgcggatggcctcgatctcctgagccgcgctcaccttacgacgctgcag

SEQ ID NO: 984 - DNA, 260 bp, Artificial Sequence
  Description of Artificial Sequence: Synthetic polynucleotide
tacgagcagcatctcaggctcggcagcgtggtcgaacggctacacaccgggatgtcgtagagcggctaccccgagaacgcagaaaagccccctacgcgccgtgtaagggcacgcagagggctctctggtagtctctattcagttgtggggttgcgtccgtcagcgtggccgctagagggggtttacggggcctcgtggacccgcacgtacggctgcagaggcttgtcacggtaggcgtgatagcgctccgcctcctcggc

SEQ ID NO: 985 - DNA, 260 bp, Artificial Sequence
  Description of Artificial Sequence: Synthetic polynucleotide
ctgaggctgggctcggctctggacctcgtaaacgcagaaaagccccctacgggccgctagggctcgcagagggcttctccggtagtctctattcagttgtgggtgtgcgtccgtcagcgtggacgctagaggggtttacggggcctcgtggacccgcacgtacggctgcagaggcttgtcacggtaggcgtggtatcgctcggcctcctcggcgcggatggcctcgatctcctgagccgcgctcaccttacgacgctgca

SEQ ID NO: 986 - DNA, 260 bp, Artificial Sequence
  Description of Artificial Sequence: Synthetic polynucleotide
cccagcgatgtgcgtgagcgcctggtcatgcggcgcgacgacttcgccgaggcgttctgagacacaacgcaaaaagcccccgtcctcgaagtgaggcgggggcttttcgttgttgggttacagcagctcggggtcgtaggggatgcggttgccgtcctggtcgatgatccagacgcgaacggtgatcacggggcgacgcgaccgtgacgctggaacgcaccccaggtgaggggcatgtcctggtggaagaagtcctccat

SEQ ID NO: 987 - DNA, 260 bp, Artificial Sequence
  Description of Artificial Sequence: Synthetic polynucleotide
ccgaaggacgtgcgtgagcggctgatcgttcgagaggatgacttcgccgagacgttctgatccacaacgcaagaagcccccgtcctcgaagatgaggcgggggcttcgttgtgcgctacagcagctcggggtcgtactcgatccgttcaccgtcttcggtgacgatccagacgcggatctcgatcacggggctacccgcccgttcatctcgaaggcgaggtgagtgaccggcatcgtgtcgatgaaggcgacctccatct

SEQ ID NO: 988 - DNA, 260 bp, Artificial Sequence
  Description of Artificial Sequence: Synthetic polynucleotide
actcctgtctggcgtaagcgaggcgacgtcgccggatcgactccctctgctgcggagtgacgggcggggctgaggctcgggccttggccacccactcctcgcgggtcactcggcacgctcccgttcgagcaggcgactgatgtcctcgcggaggtagtcgttctcggtggcttcccgaaggaggagcatccggaggtcggtgatcacggcccgagcccagaccgggagcttgtccagccgctcggactcgaacagcttgg

SEQ ID NO: 989 - DNA, 260 bp, Artificial Sequence
  Description of Artificial Sequence: Synthetic polynucleotide
tacgagcagcatctcaggctcggcagcgtggtcgaacagctacacgccgggatgtcgtagagcggctacccgagaacgcagaaaagccccctacgcgccgtgtaagggcacgcagagggctctctggtagtctctattcagttgtgaggtcgcgtccgtcgcgtggacgctagaggggtttacggggcctcgtggacccgcacgtacggctgcagaggcttgtcacggtaggcgtggtatcgctcggcctcctcggcgcg

SEQ ID NO: 990 - DNA, 260 bp, Artificial Sequence
  Description of Artificial Sequence: Synthetic polynucleotide
tacgagcagcatctcaggctcggcagcgtggtcgaacagctacacaccgggatgtcgtagagcggctacccgagaacgcagaaaagccccctacgcgccgtgtaagggcacgcagagggctctctggtagtctctattcagttgtggggttgcgtccgtcagcgtggacgctagaggggtttacggggcctcgtggacccgcacgtacggctgcagaggcttgtcacggtaggcgtgatagcgctcggcctcctcggcgc

SEQ ID NO: 991 - DNA, 260 bp, Artificial Sequence
  Description of Artificial Sequence: Synthetic polynucleotide
tacgagcagcacctccggctcggtagcgtggtcgaacagctacacaccgggatgtcgtagagcgactacccggagaacgcagaaaagccccctacgcgccgtgtaagggcacgcagagggctctctggtagtctctattcagttgtggggttgcgtccgtcagcgtggccgctagagggggtttacggggcctcgtggacccgcacgtacggctgcagaggcttgtcacggtaggcgtgatagcgctccgcctcctcggc

SEQ ID NO: 992 - DNA, 260 bp, Artificial Sequence
  Description of Artificial Sequence: Synthetic polynucleotide
tacgagcagcatctcaggctcggcagcgtggtcgaacggctacacaccgggatgtcgtagagcggctacccggagaacgcagaaaagccccctacgcgccgtgtaagggcacgcagagggctctctggcagtctctattcagttgtggggttgcgtccgtcagcgtggacgctagaggggtttacggggcctcgtggatccgtacgtacggctgcagaggcttgtcacggtaggcgtgatagcgctcggcctcctcgacg

SEQ ID NO: 993 - DNA, 260 bp, Artificial Sequence
  Description of Artificial Sequence: Synthetic polynucleotide
tacgagcagcatctcaggctcggcagcgtggtcgaacggctacacgccgggatgtcgtagagcggctacccgagaacgcagaaaagccccctacgcgccgtgtaagggcacgcagagggctctctggtagtctctattcagttgtgggtgtgcgtccgtcagcgtggacgctagaggggtttacggggcctcgtggacccgcacgtacggctgcagaggcttgtcacggtaggcgtggtagcgctcggcctcctcggcgc

SEQ ID NO: 994 - DNA, 260 bp, Artificial Sequence
  Description of Artificial Sequence: Synthetic polynucleotide
tacgagcagcatctcaggctcggcagcgtggtcgaacggctacacaccgggatgtcgtagagcggctacccgagaacgcagaagagccccctacgcgccgtgtaagggcacgcagagggctctctggtagtctctattcagttgtggggttgcgtccgtcagcgtggacgctagaggggtttacggggcctcgtggacccgcacgtacggctgcagaggcttgtcacggtaggcgtggtagcgctcggcctcctcggcgc

SEQ ID NO: 995 - DNA, 260 bp, Artificial Sequence
  Description of Artificial Sequence: Synthetic polynucleotide
tacgagcagcatctcaggctcggcagcgtggtcgaacagctacacgccgggatgtcgtagagcggctacccccgagaacgcagaaaagccccctacgcgccgtgtaagggcacgcagagggctctctggtagtctctattcagttgtggggttgcgtccgtcagcgtggatgctagaggggtttacggggcctcgtggacccgcacgtacggctgcagaggcttgtcacggtaggcgtgatagcgctccgcctcctcggc

SEQ ID NO: 996 - DNA, 260 bp, Artificial Sequence
  Description of Artificial Sequence: Synthetic polynucleotide
tacgagcaacatctcaggctcggcagcgtggtcgaacggctacacaccgggatgtcgtagagcggctacccgagaacgcagaaaagccccctacgcgccgtgtaagggcacgcagagggctctctggtagtctctattcagttgtgtggttgcgtacgtcagcgtggacgctagaggggtttacggggcctcgtggacccgtacgtacggctgcagaggcttgtcacggtaggcgtgatagcgctccgcctcctcggcgc

SEQ ID NO: 997 - DNA, 260 bp, Artificial Sequence
  Description of Artificial Sequence: Synthetic polynucleotide
tacgagcagcatctcaggctcggcagcgtggtcgaacggctacacgccgggatgtcgtagagcggctacccgagaacgcagaaaagccccctacgcgccgtgtaagggcacgcagagggctctctggtagtctctattcagttgtggggttgcgtccgtcagcgtggacgctagaggggtttacggggcctcgtggacccgtacgtacggctgcagaggcttgtcacggtaggcgtggtaacgctcggcctcctcggcgc

SEQ ID NO: 998 - DNA, 260 bp, Artificial Sequence
  Description of Artificial Sequence: Synthetic polynucleotide
tacgagcagcatctcaggctcggcagcgtggtcgaacggctacacaccgggatgtcgtagagcggctacccccgagaacgcagaagagccccctacgggccgctagggctcgcagagggcttctccggtagtctctattcagttgtgggtgtgcgtccgtctccgtggacgctagaggggtttacggggcctcgtggacccgcacgtacggctgcagaggcttgtcacggtaggtgtggtagcgctcggcctcctcggcg

SEQ ID NO: 999 - DNA, 260 bp, Artificial Sequence
  Description of Artificial Sequence: Synthetic polynucleotide
tacgagcagcatctcaggctcggcagcgtggtcgaacagctacacaccgggatgtcgtagagcggctacccccgagaacgcagaagagccccctacgcgccgtgtaagggcacgcagagggctctctggtagtctctattcagttgtggggctgcgtccgtcagcgtggacgctagaggggtttacggggcctcgtggacccgtacgtacggctgcagaggcttgtcacggtaggcgtggtatcgctcggcctcctcggc

SEQ ID NO: 1000 - DNA, 260 bp, Artificial Sequence
  Description of Artificial Sequence: Synthetic polynucleotide
tacgagcagcatctcaggctcggcagcgtggtcgaacggctacacgccgggatgtcgtagagcggctgcccccgagaacgcagaaaagccccctacgcgccgtgtaagggcacgcagagggctctctggtagtctctattcagttgtggggttgcgtccgtcagcgtggacgctagaggggtttacggggcctcgtggacccgcacgtacggctgcagaggcttgtcacggtaggcgtgatagcgctccgcctcctcggc

SEQ ID NO: 1001 - DNA, 260 bp, Artificial Sequence
  Description of Artificial Sequence: Synthetic polynucleotide
actcctgtctggcgtgcgacagccgacgcttctgcatcgaccgacgctggttctcggtaacgggcggggcagtcgccctggcggcggccacccactctgctcgggtcacgtgccgacgaccgtcccgtcctcgtacagccggtagagctcggcgcccttgtcgagctgcgcctcggcccacgcacggatgtcccacgcctgccgggagttgcccaggcggccgaggaagatgcggcgcggggtcgagctctgcaaggagg

SEQ ID NO: 1002 - DNA, 260 bp, Artificial Sequence
  Description of Artificial Sequence: Synthetic polynucleotide
ccgaaggacgttcggacccgcctggtcatacggccagacgacttcggacagaccttctgagacaacgcaagaagcccccagtcgagaggtgactgggggcttcgttgttacagcttgctcgggtcgtaggggatctcgtcgtcaccgtcgatgatgacgacctcgatctcgatcacggggcgacgcggccgtgccgcatgaaggcggaccacgtgaggggcatcgcgtcggcgaagacctcctccatctcgtcggccacc

SEQ ID NO: 1003 - DNA, 260 bp, Artificial Sequence
  Description of Artificial Sequence: Synthetic polynucleotide
ccgaaggacgttcggacccgcctggtcatacggccagacgacttcggacagaccttctgagacaacgcaagaagcccccagtcgagaggtgactgggggcttcgttgttacagcttgctcgggtcgtaggggatctcgtcgtcaccgtcgatgatgacgacctcgatctcgatcacggggagacgcggccgtgccgcatgaaggcggaccacgtgaggggcatcgcgtcggcgaagacctcctccatctcgtcggccacc

SEQ ID NO: 1004 - DNA, 260 bp, Artificial Sequence
  Description of Artificial Sequence: Synthetic polynucleotide
ccgaaggacgttcggacccgcctggtcattcggccagacgacttcggacagaccttctgagaacgcaaaaagcccccagtcgatgagtgactgggggctctgcgttacagcttgctcgggtcgtacgggatctcctcgtcaccgtcgatgatgacgacctcgatctcgatcacggggcgacgcgaccgtgccgctggaacgcgccccaggtgaggggcatgtcctgatggaggaagtcctccatcttctcggcggccatc

SEQ ID NO: 1005 - DNA, 260 bp, Artificial Sequence
  Description of Artificial Sequence: Synthetic polynucleotide
ccgaaggacgttcggacccgcctggtcatacggccagacgacttcggacagaccttctgagacaacgcaagaagcccccagtcgagaggtgactgggggcttcgttgttacagcttgctcgggtcgtaggggatctcgtcgtcaccgtcgatgatgacgacctcaatctcgatcacggggagacgcggccgtgccgcatgaaggcggaccacgtgaggggcatcgcgtcggcgaagacctcctccatctcgtcggccacc

SEQ ID NO: 1006 - DNA, 260 bp, Artificial Sequence
  Description of Artificial Sequence: Synthetic polynucleotide
ccgaaggacgttcggacccgcctggtcattcggccagacgacttcggacagaccttctgagaacgcaaaaagcccccagtcgatgagtgactgggggctctgcgttacagcttgctcggttcgtacgggtactcgtcgtcaccgtcgatgatgacgacctcgatctcgatcacggggcgacgcgaccgtgccgctggaaggctgcccaggtctcgggcatgtcgtgctggaagaagtcctccatcagctcggcggccatc

SEQ ID NO: 1007 - DNA, 260 bp, Artificial Sequence
  Description of Artificial Sequence: Synthetic polynucleotide
tacgagcagcatctcaggctcggcagcgtggtcgaacagctacacaccgggatgtcgtagagcggctacccccgagaacgcagaagagccccctacgggccgctagggctcgcagagggcttctccggtagtctctattcagttgtgggtgtgcgtccgtctccgtggacgctagaggggtttacggggcctcgtggacccgcacgtacggctgcagaggcttgtcacggtaggtgtggtagcgctcggcctcctcggcg

SEQ ID NO: 1008 - DNA, 260 bp, Artificial Sequence
  Description of Artificial Sequence: Synthetic polynucleotide
actcgaaattcagagagacaaaattatccctttaatataaaatttgagttctttgattgatctatatacagctttaattttgtttaatttgtctatatatagcatttaaatctaaataaaattcccattttatttagatctgaaagtggcttgattgcataccaaatataaggtaccctgtatatgtatcataggggtttaacagccactataactccagagagctccctcacatagctctctggtttttttaatttata

SEQ ID NO: 1009 - DNA, 260 bp, Artificial Sequence
  Description of Artificial Sequence: Synthetic polynucleotide
gaacatgccaaacatgaacatcagtgataacgcttgatatacctccatattctcacccccttccctatcgggataaaagagagtgagccgaccacccttgagagagcctagtcaattgtacatggctattgtaacatgaaaaattttactattctctacttttctacaaccatgtgtataatggacggagaggtgatttgatgactagacctacaaaccttgacgtgattatccatctacggaaaagccgaaaagatatt

SEQ ID NO: 1010 - DNA, 260 bp, Artificial Sequence
  Description of Artificial Sequence: Synthetic polynucleotide
tacgagcagcatctcaggctcggcagcgtggtcgaacgactacacgccgggatgtcgtagagcggctacccgagaacgcagaaaagccccctacgcgccgtgtaagggcacgcagagggctctctggtagtctctattcagttgtggggttgcgtccgtcagcgtggacgctagaggggtttacggggcctcgtggacccgcacgtacggctgcagaggcttgtcacggtaggcgtggtagcgctcggcctcctcggcgc

SEQ ID NO: 1011 - DNA, 260 bp, Artificial Sequence
  Description of Artificial Sequence: Synthetic polynucleotide
tacgagcagcatctcaggctcggcagcgtggtcgaacagctacacgccgggatgtcgtagagcggctacccgagaacgcagaaaagccccctacgcgccgtgtaagggcacgcagagggctctctggtagtctctattcagttgtggggttgcgtccgtcagcgtggatgctagaggggtttacggggcctcgtggacccgcacgtacggctgcagaggcttgtcacggtaggcgtggtatcgctcggcctcctcggcgc

SEQ ID NO: 1012 - DNA, 60 bp, Artificial Sequence
  Description of Artificial Sequence: Synthetic oligonucleotide
tacgaggacaagtttacgatttgctttaaagcaaaggtggagattgaagtggtaagataa

SEQ ID NO: 1013 - DNA, 260 bp, Artificial Sequence
  Description of Artificial Sequence: Synthetic polynucleotide
tatgataataaagcggtggttgaattcaaatccggacttcaatctgaagtggagatatagaatgaatattttttagcctgtaggatagaaaccacgggcttttttgtatttctatgataaaatatatgtaatgatatttttgcttttactacagtaattttagatatattcccgtttacctttgacattcataatggtgtctcaaggcacgtcgagtgcgtagtgttgctacaacgaagcaaagggtaaaaatcctttat

SEQ ID NO: 1014 - DNA, 260 bp, Artificial Sequence
  Description of Artificial Sequence: Synthetic polynucleotide
gttgtccgtcgcgaggtccgcgagggccgtgaacgacagcgagaacgccagtgcgccgacggcgattgtgccgcccgtggccacccgtaccggcgatagaatcctcatctgcaagtgcctccttatggtgtctgagctgcgaagacagtctgtcgcaactgtacttgtctcggccagccgagggatgtacacttgcgattatggcacagccgctaagagccctggtaggagccagggtatcggtcgttcaggggccgcag

SEQ ID NO: 1015 - DNA, 260 bp, Artificial Sequence
  Description of Artificial Sequence: Synthetic polynucleotide
cgacgacggctcgtacaagaccgttcacaaaaacggcaaggaccacaaggtctacaagtgcgtccgtcactgcggcggaggccgcggcaagaccgagaccaccgatccgtggtgatctaaccccgcataccaagaaaccccctacccggcccgcgaaggctaggtagggggctttttgtgtttcagtgggtgtggtcgtgatgacctgtgtcttcgtggtttgtctggtcaaccaccgcggtctcagtggtgtacggtac

SEQ ID NO: 1016 - DNA, 260 bp, Artificial Sequence
  Description of Artificial Sequence: Synthetic polynucleotide
gttgtccgtcgcgaggtccgcgagggccgtgaacgacagcgagaacgccagtgcgccgacggcgattgtgccgcccgtggccacccgtaccggcgatagaatcctcatctgcaagtgcctccttatggtgtctgagctgcgaagacagtctgtcgcaactgtacttgtctcggccagccgagggatgtacacttgcggttatggcacagccgctaagagccctggtaggagccagggtatcggtcgttcaggggccgcag

SEQ ID NO: 1017 - DNA, 260 bp, Artificial Sequence
  Description of Artificial Sequence: Synthetic polynucleotide
tacgagcagcatctcaggctcggcagcgtggtcgaacggctacacaccgggatgtcgtagagcgactgcccgagaacgcagaaaagccccctacgcgccgtgtaagggcgcgcagagggctctctggtagtctctattcagttgtggggttgcgtccgtcagcgtggacgctagaggtgtttacggggcctcgtggacccgcacgtacggctgcagaggcttgtcacggtaggcgtggtagcgctcggcctcctcggcgc

SEQ ID NO: 1018 - DNA, 260 bp, Artificial Sequence
  Description of Artificial Sequence: Synthetic polynucleotide
tacgagcagcatctcaggctcggcagcgtggtcgaacggctacacaccgggatgtcgtagagtggctacccgagagcgcagaaaagccccctacgcgccgtgtaagggcacgcagagggctctctggtagtctctattcagttgtggggttgcgtccgtcagcgtggacgctagaggggtttacggggcctcgtggacccgtacgtacggctgcagaggcttgtcacggtaggcgtggtaacgctccgcctcctcggcgc

SEQ ID NO: 1019 - DNA, 260 bp, Artificial Sequence
  Description of Artificial Sequence: Synthetic polynucleotide
tacgagcagcatctcaggctcggcagcgtggtcgaacggctacacaccgggatgtcgtagagcgactacccgagaacgcagaaaagccccctacgcgccgtgtaagggcacgcagagggctctctggtagttctctattcagttgtggggttgcgtccgtcagcgtggacgctagaggggtttacggggcctcgtggacccgcacgtacggctgcagaggcttgtcacggtaggcgtggtagcgctccgcctcctcggcg

SEQ ID NO: 1020 - DNA, 260 bp, Artificial Sequence
  Description of Artificial Sequence: Synthetic polynucleotide
tacgagcagcatctcaggctcggcagcgtggtcgagcagctacacgccgggatgtcgtagagcggctacccgagaacgcagaaaagccctctacgcgccgtgtaagggcgcgcagagggctctctggcagtctctattcagttgtggggttgcgtccgtcagcgtggacgctagaggggtttacggggcctcgtggacccgtacgtacggctgcagaggcttgtcacggtaggcgtggtagcgctccgcctcctcggcgc

SEQ ID NO: 1021 - DNA, 260 bp, Artificial Sequence
  Description of Artificial Sequence: Synthetic polynucleotide
tacgagcagcatctcaggctcggcagcgtggtcgaacagctacacaccgggatgtcgtagagcggctacccgagaacgcagaaaagccccctacgcgccgtgtaagggcacgcagagggctctctggtagtctctattcagttgtggggttgcgtacgtcagcgtggacgctagaggggtttacggggcctcgtggacccgcacgtacggctgcagaggcttgtcacggtaggcgtggtatcgctcggcctcctcggcgc

SEQ ID NO: 1022 - DNA, 260 bp, Artificial Sequence
  Description of Artificial Sequence: Synthetic polynucleotide
attttttgtgaccaaacagtggctataaaatttaagaatggaatagaggtagtagagtaattctatgaaattttgatataatgtgtgtaaaaaaagtaggtaagaataaagtcttatgaacgagttttgctataaacttaaaggaaaaatacttagaactggccagaaatgggatttgctttcgagttcccaagctgatgtacccctctttgtcgcaaagtatctaaataatgagccaccaaggtatgtggggaaaatac

SEQ ID NO: 1023 - DNA, 260 bp, Artificial Sequence
  Description of Artificial Sequence: Synthetic polynucleotide
ggcggggggtttttcagtcgagcgaggtcagcctggcatacgcgtcaagcgttgtccacaaaccctaaagatcgggaactcgatgttcagactttgtgaaagggctgtcttcatggacaactgtaacacgttctagtctgacgaccctggcgtaggcgatccgattttgcggctatgcgaacatcggatacgctgctgacatgcgagttcttggaagaatcagattgtcgagagccacagacgagagcaccagcgtcgag

SEQ ID NO: 1024 - DNA, 260 bp, Artificial Sequence
  Description of Artificial Sequence: Synthetic polynucleotide
tacgagcagcatctcaggctcggcagcgtggtcgaacggctacacaccgggatgtcgtagagcggctacccgagaacgcagaaaagccccctacgcgccgtgtaagggcacgcagagggctctctggtagtctctattcagttgtgtggttgcgtccgtcagcgtggacgctagaggggtttacggggcctcgtggacccgtacgtacggctgcagaggcttgtcacggtaggcgtggtagcgctccgcctcctcggcgc

SEQ ID NO: 1025 - DNA, 260 bp, Artificial Sequence
  Description of Artificial Sequence: Synthetic polynucleotide
gaaataactttcgctttaaaatgtgggctgaatttaacagaaaggttggtaaagatatgacacatacaccatatggataccgcatcgaaaatggaatagcggtagttgatgaagttgatgcagaaagaatcaaggctctttatcaagaatacattgattgtaagtctatgagagctgctactaagaaagctggaattgataagactcattcagttataggtagaattctaaagaataaagtatatcttggtacagtttat

SEQ ID NO: 1026 - DNA, 60 bp, Artificial Sequence
  Description of Artificial Sequence: Synthetic oligonucleotide
attaaggaaaatagaaatattgaatttatctttaaaaatggtgaggttacagttcattga

SEQ ID NO: 1027 - DNA, 60 bp, Artificial Sequence
  Description of Artificial Sequence: Synthetic oligonucleotide
attaccaaagaaaaatcagctattttcaccttcaagagtggtcaggaaattatcatttga

SEQ ID NO: 1028 - DNA, 60 bp, Artificial Sequence
  Description of Artificial Sequence: Synthetic oligonucleotide
ataaaagtagacaagcacatcagcctaaccttcaaaaatggcgtgcggattgatttataa

SEQ ID NO: 1029 - DNA, 60 bp, Artificial Sequence
  Description of Artificial Sequence: Synthetic oligonucleotide
attaaagagggcaagaaaatcagcctcaccttcaaaaatggtgttcggattgatttatag

SEQ ID NO: 1030 - DNA, 260 bp, Artificial Sequence
  Description of Artificial Sequence: Synthetic polynucleotide
gtagtagattctgaaggtcaaatagatgtcataactcctcttggggttgttaaagattaattttacgtgtttcaaaccacatctccaatgtaacatgttttgaaacacagaaaccaattcgaattttcttcgggatttttccaaaaaaaataacgtttttgtatcagtcattttgtttttgataagttatatttatagcatggccacaaagaaagagagggtaccgattctggttcctctctttttctattttaattttg

SEQ ID NO: 1031 - DNA, 260 bp, Artificial Sequence
  Description of Artificial Sequence: Synthetic polynucleotide
gtagtagattctgatggtcaaatagatgtcataactcctctaggggttattaaagattaattttacgtatttcaaaccacatctccaatataacatgttttgaaacacagaaaccaattcgaattttcttcgggatttttccaaaaaaaataacgtttttgtatcagtcatttggattttgataagttatatttatagcatggccacaaagaaagagagggtaccgattctggttcctctctttttctattttaattttg

SEQ ID NO: 1032 - DNA, 260 bp, Artificial Sequence
  Description of Artificial Sequence: Synthetic polynucleotide
gggaccatccacgcctgagccacgccgttgtcggccgcgagctcggtgagcgcggtgaacgacagcgagaacgccagagcgccgaccgccacggttccggctgtcgcgacacgcacgggggatagaatcgacattgcacgagctcctatctcgtgtatcgcccctggtctgttcgcgcaggccaggggctttctgacctagtgaagaatcccgaaaatcgggagcccgagtttcaacattcttctctccttgctactgtg

SEQ ID NO: 1033 - DNA, 260 bp, Artificial Sequence
  Description of Artificial Sequence: Synthetic polynucleotide
gatgagctgacattcaatttgaaatgcggtctttccctgaaagaaaaggtggtgagataaatggcatatattccatatggatacaaaattcaagatggagtggttactgtcgatgaaaaggcagcaggtcaagtaaaggtattctttgagaaatacatatcaggactatcccttacagtggctggcgaacaggcaggtattgataagacacactctgtgatgggtcgcattttgaaaaacgtcaactaccttggaaatga

SEQ ID NO: 1034 - DNA, 260 bp, Artificial Sequence
  Description of Artificial Sequence: Synthetic polynucleotide
acagtctatgaagaccacttcgtcatagccttcaaatcaggtttcgaaatggaagtatgagatgcatttgattatttttgtattgaacacatcgttttgttgtgttattctataggttgatataaataaagatgtaggaggaaccgaaactatgacagcatcaatacgtttaagataagctggcaataaaaaaggcagaatctatcccaatgataggcttttttgttgtgcttatttatacgatattgagcattcattag

SEQ ID NO: 1035 - DNA, 260 bp, Artificial Sequence
  Description of Artificial Sequence: Synthetic polynucleotide
ggccccatcgaggagcgcgtgcgcctccactggcacccgccgctcgagctcgccgcctagtttcgcgggaagagcaacaaaggcggacgctggtggcggacgctgggcggacgatgccctcccccagcgtccgcctagcaccgtccgccaccgtccgccaccgtccgccgagcccaaaatgacaccaccgtccgcccagcgtccgccccagcgtccgccccagcgtccgcctagaaacccgcggaattacgcggcaaaac

SEQ ID NO: 1036 - DNA, 260 bp, Artificial Sequence
  Description of Artificial Sequence: Synthetic polynucleotide
atcaccaaggatagtgatgttgaaattacatttaagaacggagcggtctcaactatataggtacgactgctttattttttttgatataatagatgtaaaataatttagtaagaacggtgaattgaatggattttgaaactttaactcgttttatcatttgtgaagcaaaagtgttgagtggtcagacattcaataattttgaagaatttttagtggtttttgaagaattctatagttctattacgaatgaactggttaga

SEQ ID NO: 1037 - DNA, 260 bp, Artificial Sequence
  Description of Artificial Sequence: Synthetic polynucleotide
atcaccaaggatagtgatgttgaaattacatttaagaacggagcggtctcaactatataggtacgactgctttatttttttttgatataatagatgtaaaataatttagtaagaacggtgaattgaatggattttgaaactttaactcgttttatcatttgtgaagcaaaagtgttgagtggtcagacattcaataattttgaagaatttttagtggtttttgaagaattctatagttctattacgaatgaactggttag

SEQ ID NO: 1038 - DNA, 260 bp, Artificial Sequence
  Description of Artificial Sequence: Synthetic polynucleotide
actgtgtatgaagaccacttcgtcatagccttcaaatctggcttcgaaatggaaatatgaaaaccagaagtaaatagcccatgactctacagtagagttgtgggttttcttttgcttgctgattataataatattttaataactattgtgtttatcaaccaaatggtttataatattcttagcgtaaacttggaggtgctgtatgactacggcagaaatgattaaagaactgtgtgagcaaatgaatataagtgtttccg

SEQ ID NO: 1039 - DNA, 260 bp, Artificial Sequence
  Description of Artificial Sequence: Synthetic polynucleotide
gggaccatccatgcctgcgccacgccgttgtcggccgcgagctccgtgagcgcggtgaacgacagcgagaacgccagacctccgaccgccacggttccggccgtcgcgacacgcacgggggatagactcagcactgcaccagctcctatctggtgtaacgcccctggtctgttcacgcaggccaggggctcttttcgttagtgaagaatcccgaaaaacgggagcccgagtttcaacattcttctctccttgctactgtc

SEQ ID NO: 1040 - DNA, 260 bp, Artificial Sequence
  Description of Artificial Sequence: Synthetic polynucleotide
gggagcatccacgcctgagccacgccgctgtcggccgcgagctcggtgagcgcggtgaacgacatcgagaaggccagagctccgaccgcgaccgttccggccgtcgcgacacgcacgggggatagaatcgacactgcaccagctcctatctggtgtaacgcccctggtctgttcgcgcaggccaggggctctttcctctagtgaataatcccgagaatcgggagcccgagttttatcattcttcactccttgctaccatg

SEQ ID NO: 1041 - DNA, 260 bp, Artificial Sequence
  Description of Artificial Sequence: Synthetic polynucleotide
aatgacttcttcgcccagggcgccgaagagctagaagcaatagcacgcgctgaggcgtgacacagcgggaaggggtcgagccggcgaacccggttcggcccttttttcgtgatctcagatcgttagttagactaactagtggttccttcgtcacggcagcgggcaggcgcacgacgtctgacctgggcgaagtgatgttgtgacgtagtgatccattttcatgattcacataagacttctctaagggcaatccggagtcg

SEQ ID NO: 1042 - DNA, 260 bp, Artificial Sequence
  Description of Artificial Sequence: Synthetic polynucleotide
aatgagttcttcgatcagggcgccgaagagcttgaagcaatcgcacgcactgaagcctgatccagcgggaaggggtcgagccggcgaacccggttcggcccttttttcgtggcgtcagatcgttagttagtctaactagtagtgactccgtcacgtcagcgggcaggggcaagccgtctgacctggggcgagtgatgctgtgacgtagtgacccgttttcatgattcacataagacttctctaagggcaatccggagtcg

SEQ ID NO: 1043 - DNA, 60 bp, Artificial Sequence
  Description of Artificial Sequence: Synthetic oligonucleotide
atttataaaaataaaaaagtagcagttcacttcaaaaacggtcaggttatcgaaatataa

SEQ ID NO: 1044 - DNA, 260 bp, Artificial Sequence
  Description of Artificial Sequence: Synthetic polynucleotide
gtcgtggcgacgatgatgccgccgtcgacaacgagggggaccatccacgcctgcgacactccgttgtccgctgagagctcactgagcgccgtgaacgacaacgcgaaggccaagccgccgaccgcgaccgttccggccgtcgccactctgactggggatagcatctgcactggtgaggggtcctttctcttcgacttccaatgtgttggattctgccagcagttcctgtaacattggaaactatgccacaaccgctaaga

SEQ ID NO: 1045 - DNA, 260 bp, Artificial Sequence
  Description of Artificial Sequence: Synthetic polynucleotide
tcttgcggtctgcgtcgtgtcgctcccggtcggcttgatcgttgtggccattggagcgtaccgggtagcaaaggccggggatatttatgacgctgcggtcgctcggtacgagcagcaaatctcggactatgttgactggctggatgaagtcaacgcaaaataaaaagccgccctcggtgggcggcgggaggttgctctgaatgtgcgcaaaaaagaaaccggccatgcttgagccggatatgcaggatgccgtgatctac

SEQ ID NO: 1046 - DNA, 260 bp, Artificial Sequence
  Description of Artificial Sequence: Synthetic polynucleotide
cactgggagctacgcactcctgagcacgagccgcggctggtcccccgcaccgccgagtgactccccggcgtaggccgccctgtgcgtccacggcgacgccggagagtgtcataggagtgagcctggagacgccagagtgcgccggggatgctgcccataacggttatgtcacggtcaaatcggtgtcagaccccagtcgtaaacttgttcgactgacgttctgacgcaactttcgtcatttctctatccagcttctagtc

SEQ ID NO: 1047 - DNA, 260 bp, Artificial Sequence
  Description of Artificial Sequence: Synthetic polynucleotide
ctttattaccatgtcaaccggaaggcgcgaatcattagcaaggacggcccgaacgactgcgattggtctgctgccaattttgcgtatgatctattaagttcgggcgtcgaacttttggaacatgagacggcaagtgaatataacgaacgcgtcgggattccgccgctcgtatctggctatatgaaagcgaggttaaactaatgaacagtttagaagtggcgatctatcttcgtaagtcacgggccgatgttgaggaagaa

SEQ ID NO: 1048 - DNA, 260 bp, Artificial Sequence
  Description of Artificial Sequence: Synthetic polynucleotide
tacgagcagcatctcaggctcggcagcgtggtcgaacggctacacgccgggatgtcgtagagcggctacccgagaacgcagaaaagccccctacgcgccgtgtaagggcacgcagagggctctctggtagtctctattcagttgtgtggttgcgtccgtcagcgtggacgctagaggggtttacggggcctcgtggacccgcacgtacggctgcagaggcttgtcacggtaggcgtggtagcgctcggcctcctcgacgc

SEQ ID NO: 1049 - DNA, 260 bp, Artificial Sequence
  Description of Artificial Sequence: Synthetic polynucleotide
gacggttccggctgttgccattgggacggcagatagaatcctcatgcaccgctcctatcggtgtgaagtggcccctcgtctgttagcgcaggcggggggttttcaagttggaccgtaccacggcaagcctcctacctggcaagatagtttcccaagtggctcagagtactggtatagtgatcgttatgggaattacgaagttgcaggtcagagcactggtcggtgctcgcgtgtctcacgtccaaggcgaggaaaagaca

SEQ ID NO: 1050 - DNA, 260 bp, Artificial Sequence
  Description of Artificial Sequence: Synthetic polynucleotide
tacgagcagcatctcaggctcggcaacgtggtcgaacggctacacaccgggatgtcgtagagcgactacccgagaacgcagaaaagccccctacgcgccgtgtaagggcacgcagagggctctctggcagtctctattcagttgtgggtgtgcgtccgtctccgtggacgctagaggggtttacggggcctcgtggacccgcacgtacggttgcagaggcttgtcacggtaggcgtggtatcgctcggcctcctcggcgc

SEQ ID NO: 1051 - DNA, 260 bp, Artificial Sequence
  Description of Artificial Sequence: Synthetic polynucleotide
ttattccgttttgcttcatttattctttattttcgtaaaatttgcaaaaagaaaaagcccgccgggccgaagcctgacgggctataaatgaaactgtatttatatgatcctgcagtgatttatgatttttcgtctcacgccttgcgctttcgtctaatccgcaggccaatgagacgattacctgaaaggacactcaaggtatggcaaaaagaaaattcaacaagggcggcgaagtgcggctggtcgcctattacagatac

SEQ ID NO: 1052 - DNA, 260 bp, Artificial Sequence
  Description of Artificial Sequence: Synthetic polynucleotide
tacgagcagcatctcaggctcggcagcgtggtcgagcggctacacaccgggatgtcgtagagcggctacccgagaacgcagaaaagccccctacgcgccgtgtaagggcacgcagagggctctctggtagtctctattcagttgtggggttgcgtacgtcagcgtggacgctagaggggtttacggggcctcgtggacccgcacgtacggctgcagaggcttgtcacggtaggcgtggtatcgctcggcctcctcggcgc

SEQ ID NO: 1053 - DNA, 260 bp, Artificial Sequence
  Description of Artificial Sequence: Synthetic polynucleotide
agcagaacggaaattggctttgttatgaaatttggacctatttttaaagagaggatttaagatgaagcatacaccatatggatatattatcgtggacggtaaggcagtagtaaacgaaaaagaggcaaagagattacaaaaaatttgtgataattatctttcaggaatgtcatttgtagcatctgcaaaatcagttggccttaaaatgcagcattctggggttaaaagattgatgcttaataaacgttatttaggggatg

SEQ ID NO: 1054 - DNA, 60 bp, Artificial Sequence
  Description of Artificial Sequence: Synthetic oligonucleotide
atctataaagacaaacaagtagaagtccacttcaagaacgaacaagtcatatctatgtga

SEQ ID NO: 1055 - DNA, 260 bp, Artificial Sequence
  Description of Artificial Sequence: Synthetic polynucleotide
agcaaaaacacatgctacttctgatattgtgaaacttactaatttatcaaataaaagtgtttatgatgtattaaataaatataacgtaaaagctgtaaataaaaatcaatggatagcaacagatgttgatattgaagatgagatagatttatcagttacatttactttgaataagaatggaataagaggtggaattatagatgagaactaatgaacataacttccataatatagaagaagaaatcaaacatgttgctgta

SEQ ID NO: 1056 - DNA, 260 bp, Artificial Sequence
  Description of Artificial Sequence: Synthetic polynucleotide
ttgtggactggtatatggcaatcattaaagctgcacaaaataaaggctatgtatggcgatctaaaaaatggttttcaggtaaaaagcaaacgttcttctgtcatgattgtgggaataacttttctgcttaaaattatgaacttaacaaaaaataaaaaaagtcctccaagttttggtcgaggaggaggacttaatcacaaatgtatagcaagacacacaaaagatgtgatgttttactatgctcaattttaacacagaat

SEQ ID NO: 1057 - DNA, 260 bp, Artificial Sequence
  Description of Artificial Sequence: Synthetic polynucleotide
gtcacttatctttctaacccatactacaaatctctaacaacaactctttcaactcatgaattctctttccctaaaaaacttgatgtctcagatttttatagatttttagttcaattatctatcgaaaatagacaaaaaattaattcataaaacaaaaaaagccctccaagttttggtagaggaggagggcttaatcacaaatgtatagcaagacacacaaaagatgtgatgttttactatgctcaattttaacacagaat

SEQ ID NO: 1058 - DNA, 260 bp, Artificial Sequence
  Description of Artificial Sequence: Synthetic polynucleotide
catccacgcctgcgacacgccgttgtccgctgacagctcactcagcgccgtgaacgataacgcgaaggccaagccgccgaccgcgaccgttccggccgtcgccactctgactggggatagcatctgcactggtgagagccctttcctatcgacttacaatgtgctggattctgccagcagagtccggtacattggaaactatgccacaaccacttagagccctggtcggggcccgagtcagtgtagtccaaggaccgcag

SEQ ID NO: 1059 - DNA, 60 bp, Artificial Sequence
  Description of Artificial Sequence: Synthetic oligonucleotide
aactctggcagaccagcgttgagcgattggatatcaaagaagataagaaaatcagcctaa

SEQ ID NO: 1060 - DNA, 60 bp, Artificial Sequence
  Description of Artificial Sequence: Synthetic oligonucleotide
gatcaaatcatagttcacccagatggaaaaattgaaatcctttataaattcaaggtttaa

SEQ ID NO: 1061 - DNA, 100 bp, Artificial Sequence
  Description of Artificial Sequence: Synthetic polynucleotide
aagaagcagagagaagacaacttcgaactttggatttatccaaagctgcctgaaaaataggcgtttgtactggtgtctaacatgcagaaggtaactcatt

SEQ ID NO: 1062 - DNA, 260 bp, Artificial Sequence
  Description of Artificial Sequence: Synthetic polynucleotide
cgaggagacccggacgctcgacttcgggaacacccgctacacctgctgacaaccgccctcgggccggtccttcggggccggctcgggggctcttttttttttgtgcctaacatatgcacggattcgcatatatttattagggcaacgtgatgttcgaggagtagaacatcactttcaccaaactcatgtaccctgtccctatgcgtgttctcgggagactgcgtctgtccaggtcaacggaggaatctacctccatcgag

SEQ ID NO: 1063 - DNA, 260 bp, Artificial Sequence
  Description of Artificial Sequence: Synthetic polynucleotide
agggggaccatccacgcctgcgacactccgttgtccgctgagagctcactgagcgccgtgaacgacaacgcgaaggccaagccgccgaccgcgaccgttccggccgtcgccactctgactggggatagcatctgcactggtgaggggtcctttctcatcgacttccaatgtgttggattctgccagcagttcctgtaacattggaaactatgccacaaccgctaagagccctggtcggggcccgagtcagtgtagtccaa

SEQ ID NO: 1064 - DNA, 260 bp, Artificial Sequence
  Description of Artificial Sequence: Synthetic polynucleotide
aggggaaccatccacgcctgcgacactccgttgtccgctgaaagctcactgagcgccgtgaacgacaacgcgaaggccaagccgccgaccgcgaccgttccggccgtcgccactctgactggggatagcatctgcactggtaggaggtcctttcccgtcgacttacaatgtgttggattctgccagcagaacctgtaacattggaaactatgccacaaccgcttagagccctggtcggggcccgagtcagtgtagtccaa

SEQ ID NO: 1065 - DNA, 260 bp, Artificial Sequence
  Description of Artificial Sequence: Synthetic polynucleotide
ctcactcagcgccgtgaacgacaacgcgaaggccaagctgccgaccgcgaccgtaccggccgtcgcaacccgaaccggggatagaatcttcactgcaccagctcctatctggtgtcacaccctctgcctgttcgcgcaggtagagggccctttgcttacgacttccaatgtgttggattctgccagcagaacctgtaacattggaaactatgccacaaccgcttagagccctggtcggggcgcgtgtcagtgtagtccaa

SEQ ID NO: 1066 - DNA, 260 bp, Artificial Sequence
  Description of Artificial Sequence: Synthetic polynucleotide
gcccgagagcccaccctctctgtccggaccgtacctgttcgaccttcgcaaccaacgatgctgacacccgccctcgggtcggtcttcggaccggctcgggggctcctttttttgtgcccaaatcccatgcacgatcacgcatgtatcagtattgggggaacgcgatattcgaggagtagaacatcaccttcaccaaattcatgtatcctaccttcgtgcgtgtgttggggagactgcgtctgtcgaggtcaacggaggaa

SEQ ID NO: 1067 - DNA, 260 bp, Artificial Sequence
  Description of Artificial Sequence: Synthetic polynucleotide
agggggaccatccacgcctgcgacactccgttgtccgctgagagctcactgagcgccgtgaacgacaacgcgaaggccaagccgccgaccgcgaccgttccggccgtcgccactctgactggggatagcatctgcactggtaggaggtcctttcccgtcgacttacaatgtgttggattctgccagcagaacctgtaacattggaaactatgccagaaccgcttagagccctggtcggggcccgtgtcagtgtagtgcaa

SEQ ID NO: 1068 - DNA, 260 bp, Artificial Sequence
  Description of Artificial Sequence: Synthetic polynucleotide
ctgaggctgggcgcggctctagacctcgtaaacgcagaaaagccccctacgggccgctagggctcgcagagggcttctccggtagtctctattcagttgtactgctgagtccgtcagcgtgggtgctagaggggtttacggggcctcgtggacccgcacgtacggctgcagaggcttgtcacggtaggcgtggtagcgctcggcctcctcggcgcggatggcctcgatctcctgagccgaactcaccttacgacgctgca

SEQ ID NO: 1069 - DNA, 260 bp, Artificial Sequence
  Description of Artificial Sequence: Synthetic polynucleotide
ctgaggctgggctcggctctagaccttgtaaacgcagaaaagccccctacgggccgctagggcacgcagagggctctctggtagtctctattcagttgtactgctgagcccgtcagcgtggacgctagaggggtttacggggcctcgtggacccgcacgtacggctgcagaggcttgtcacggtaggcgtggtagcgctctttctcgtcggagatcggcttgagaagctcgctgtcgatatgctcccgcacgaccttcat

SEQ ID NO: 1070 - DNA, 260 bp, Artificial Sequence
  Description of Artificial Sequence: Synthetic polynucleotide
ctgaggctgggctcggctctagaccttgtaaacgcagaaaagccccctacgggccgctagggctcgcagagggcttctccggtagtctctattcagttgtactgctgagtccgtcagcgtggacgctagaggggtttacggggcctcgtggacccgcacgtacggctgcagaggcttgtcacggtaggcgtggtagcgctcggcctcctcggcgcggatggcctcgatctcctgagccgcgctcaccttacgacgctgca

SEQ ID NO: 1071 - DNA, 260 bp, Artificial Sequence
  Description of Artificial Sequence: Synthetic polynucleotide
ctgaggctgggcacggctctagacctcgtaaacgcagaaaagccccctacgggccgctagggctcgcagagggcttctccggtagtctctattcagttgtactgctgagtccgtcagcgtggacgctagaggggtttacggggcctcgtggacccgcacgtacggctgcagaggcttgtcacggtaggcgtggtagcgctcggcctcctcgacgcggatggcctcgatctcctgagccgcgctcaccttacgacgctgca

SEQ ID NO: 1072 - DNA, 260 bp, Artificial Sequence
  Description of Artificial Sequence: Synthetic polynucleotide
ctgaggctgggctcggctctggacctcgtaaacgcagaaaagccccctacgggccgctagggctcgcagagggcttctccggtagtctctattcagttgtgggtgtgcgtccgtcagcgtggacgctagaggggtttacggggcctcgtggacccgcacgtacggctgcagaggcttgtcacggtaggcgtggtagcgctcggcctcctcggcgcggatggcctcgatctcctgagccgcgctcaccttacgacgctgca

SEQ ID NO: 1073 - DNA, 260 bp, Artificial Sequence
  Description of Artificial Sequence: Synthetic polynucleotide
atccacgcctgcgacactccgttgtccgctgagagctcactgagcgccgtgaacgacaacgcgaaggccaagccgccgaccgcgaccgttccggccgtcgccactctgactggggatagcatctgcactggtgaggggtcctttctcatcgacttccaatgtgttggattctgccagcagttcctgtaacattggaaactatgccacaaccgctaagagccctggtcggggcccgagtcagtgtagtccaaggaccgcag

SEQ ID NO: 1074 - DNA, 260 bp, Artificial Sequence
  Description of Artificial Sequence: Synthetic polynucleotide
ctgaggctgggcgcggctctatacctcgtaaacgcagaaaagccccctacgggccgctagggctcgcagagggcttctccggtagtctctattcagttgtactgctgagtccgtcagcgtgggcgctagaggggtttatggtgcctcgtggacccgcacgtacggctgcagaggcttgtcacggtaggcgtggtagcgctctttctcgtcggagatcgacttgagaagctcgctgtcgatattctcccgcacgaccttca

SEQ ID NO: 1075 - DNA, 260 bp, Artificial Sequence
  Description of Artificial Sequence: Synthetic polynucleotide
ctgaggctgggcacggctctagacctcgtaaacgcagaaaagccccctacgggccgctagggctcgcagagggcttctccggtagtctctattcagttgtactgctgagtccgtcagcgtggatgctagaggggtttacggggcctcgtggacccgtacgtacggttgcagaggcttgtcacggtaggcgtggtatcgctcggcctcctcggcgcggatggcctcgatctcctgagccgcgctcaccttacgacgctgca

SEQ ID NO: 1076 - DNA, 260 bp, Artificial Sequence
  Description of Artificial Sequence: Synthetic polynucleotide
ctgaggctgggctcggctctagacctcgtaaacgcagaaaagccccctacgggccgctagggctcgcagagggcttctccggcagtctctattcagttgtgggtgtgcgtccgtctccgtggacgctagaggggtttacggggcctcgtggacccgcacgtacggctgcagaggcttgtcacggtaggcgtggtatcgctcggcctcctcggcgcggatggcctcgatctcctgagccgcgctcaccttacgacgctgca

SEQ ID NO: 1077 - DNA, 260 bp, Artificial Sequence
  Description of Artificial Sequence: Synthetic polynucleotide
ctgaggctgggcgcggctctagacctcgtaaacgcagaaaagccccctacgggccgctagggctcgcagagggcttctccggtagtctctattcagttgtgggtgcgcgtccgtctccgtggacgctagaggggtttacggggcctcgtggacccgcacgtacggctgcagaggcttgtcacggtaggcgtggtagcgctcggcctcctcggcgcggatggcctcgatctcctgagccgcgctcaccttacgacgctgca

SEQ ID NO: 1078 - DNA, 260 bp, Artificial Sequence
  Description of Artificial Sequence: Synthetic polynucleotide
gaaaataataatcaatccaaagttttaggtttaagattaaaaacagtacatgacttagctaccgctcttaatgttaaagaaaataaaatattaattttagataaagactaggttttaattatatttatttacctagtctttattttattgaattacatctattaattacatataatgaatgtaaaaggaggtattttccaatgaataaaaaaatatgtatttatttaagaaagtctagagctgatgaagaacttgaaaaa

SEQ ID NO: 1079 - DNA, 260 bp, Artificial Sequence
  Description of Artificial Sequence: Synthetic polynucleotide
cactgaattaaaaagtgaaatatcagaagttaagaaaactgtaataagaattgaaaatgaccatggtaaaaaacttgaagctttatttgatggttataaacaaaattcagagaaacttaatagaattgaagatgaagttgccaaacataaagaagtaattataaaaaggattaaataattatatttaatgaggtgatgttttgaataaaatttgtatttatttaagaaaatcacgtgctgatgaagaacttgaaaaaact

SEQ ID NO: 1080 - DNA, 260 bp, Artificial Sequence
  Description of Artificial Sequence: Synthetic polynucleotide
cactgaattaaaaagtgaaatatcagaagttaagaaaactgtaataagaattgaaaatgaccatggtaaaaaacttgaagctttatttgatggttataaacaaaattcagagaaacttaatagaattgaaaatgaagttgccaaacataaagaagtaattataaaaaggattaaataattatatttaatgaggtgatgttttgaataaaatttgtatttatttaagaaaatcacgtgctgatgaagaacttgaaaaaact

SEQ ID NO: 1081 - DNA, 260 bp, Artificial Sequence
  Description of Artificial Sequence: Synthetic polynucleotide
gtggatcttcgtggcgatcaacaacagcggcaagaccaagacggtctaccgctgaccccgacctccgggctggccttcgggctggcccgggggtctttttttgtgcccaacatatgcacgtattcgcatctgtttgtttggggaacgtgatattcgaggagtagaacatcacctttaccaaactcttgtatcctgtcggtatgcgtgtactaggaagactgcgtctgtccaggtcaacggaggaatctacctccatcgag

SEQ ID NO: 1082 - DNA, 260 bp, Artificial Sequence
  Description of Artificial Sequence: Synthetic polynucleotide
gggaccatccatgcgtgggccactccgctgtcggccgccagctccgtgagggcggtgaacgagagcgagaacgccaggcccccaacgaaaacggtgcctgcggtagccagcttgacgggagagagcatcggagcctttcgggggatgtgatgttcgaggagtagaacatcacttttaccaaactccggtatccttgtcatatgcgagtgctcggaagattgcgtttgtccaggtcaacggaggaatctacctccatcgag

SEQ ID NO: 1083 - DNA, 260 bp, Artificial Sequence
  Description of Artificial Sequence: Synthetic polynucleotide
ctctctgttcggaccgtacctgttcgaccttcgcaaccaacgatgctgacacccgccctcgggtcggtcttcggaccggctcgggggctcctttttttgtgcccaaatcccatgcacgatcacgcatgtatcagtattgggggaacgcgatattcgaggagtagaacatcaccttcaccaaattcatgtatcctaccttcgtgcgtgtgttggggagactgcgtctgtcgaggtcaacggaggaatccacctcgattgag

SEQ ID NO: 1084 - DNA, 260 bp, Artificial Sequence
  Description of Artificial Sequence: Synthetic polynucleotide
gtccagcccagccacgtctccttcgagatggggctacttgtgctggcacgacacggtgagtggctaggtccgtgggtcgcattgggacaaagcccgcagggctagggggacaaggcgagggccacaggtctagccgcccgtagggcgtccttacggtcaggggagcccccgtcaggggtcagtctccaggagccgtttcaatgccaacgtacgatagatccatgcgcgtgataggccgactaagaatctcccgtcagtcc

SEQ ID NO: 1085 - DNA, 260 bp, Artificial Sequence
  Description of Artificial Sequence: Synthetic polynucleotide
gtccagcccagccacgtctccttcgagatggggctacttgtgctggcacgacacggtgagtggctaggtccgtgggtcgcattgggacaaagcccgcagggctagggggacaaggcgagggccaagggtctagccgcccgtagggcgtccttacggtcaggggagcccccgtcaggggtcagtctccaggagccgttccaatgccaacgtacgatagatccatgcgcgtgataggccgactaagaatctcccgacagtcc

SEQ ID NO: 1086 - DNA, 260 bp, Artificial Sequence
  Description of Artificial Sequence: Synthetic polynucleotide
agtccagcccagccacgtctccttcgagatggggctacttgtgctggcctgacacggtgaggggctaggtccgtgggtcgcattgggacaagcccgcagggctagggggacaaagcgagggccaagagtctagtcgcccgaagggcgtccttacggtcaggggagcccccgtcaggggtcagtctccaggagccgtttcaatgccaacgtacgatagatccatgcgcgtgataggccgactgagaatctcccgacaaacc

SEQ ID NO: 1087 - DNA, 260 bp, Artificial Sequence
  Description of Artificial Sequence: Synthetic polynucleotide
gggaccatccatgcgtgggccactccgctgtcggccgccagctccgtgagggcggtgaacgacagggagaacgcgaggccgccaacgaacacggtgcctgcggtagccagcttgacgggagagagcatcggagcctttcgggggatgtgatgttcgaggagtagaacatcacttttaccaaactccggtatccttgtcatatgcgagttctgggaagattgcgtttgtcgaggtcaacggaggaatctacctccatcgag

SEQ ID NO: 1088 - DNA, 260 bp, Artificial Sequence
  Description of Artificial Sequence: Synthetic polynucleotide
agtccagcccagccacgtctccttcgagatggggctacttgtgctggcctgacacggtgaggggctaggtccgtgggtcgcattgggacaagcccgcagggctagggggacaaagcgagggccaagagtctagtcgcccgaagggcgtccttacggtcaggggagcccccgtcaggggccaatctccaggagccgttccgatgccaacgtacgatagatccatgcgcgtgataggccgactgagaatctcccgacaaacc

SEQ ID NO: 1089 - DNA, 260 bp, Artificial Sequence
  Description of Artificial Sequence: Synthetic polynucleotide
ctctctgtccggaccgtacctgttcgaccttcgcaaccaacgatgctgacacccgccctcgggtcggtcttcggaccggctcgggggctcctttttttgtgcccaaatcccatgcacgatcacgcatgtatcagtattgggggaacgcgatattcgaggagtagaacatcaccttcaccaaattcatgtatcctaccttcgtgcgtgtgttggggagactgcgtctgtcgaggtcaacggaggaatccacctcgattgag

SEQ ID NO: 1090 - DNA, 260 bp, Artificial Sequence
  Description of Artificial Sequence: Synthetic polynucleotide
gggaccatccatgcgtgggccactccgctgtcggccgccagctccgtgagggcggtgaacgagagcgagaacgccaggcccccaacgaaaacggtgcctgcggtggccagcttgacgggagagagcatcggagcctttcgggggatgtgatgttcgaggagtagaacatcacttttaccaaactccggtatccttgtcatatgcgagtgctcggaagattgcgtttgtccaggtcaacggaggaatctacctccatcgag

SEQ ID NO: 1091 - DNA, 260 bp, Artificial Sequence
  Description of Artificial Sequence: Synthetic polynucleotide
ctgaggctgggctcggctctagacctcgtaaacgcagaaaagccccctacgggccgctagggctcgcagagggcttctccggtagtctctattcagttgtactgctgagtccgtcagcgtgggcgctagaggggttttacggggcctcgtggacccgcacgtacggctgcagaggcttgtcacggtaggtgtggtagcgctcggcctcctcggcgcggatggcctcgatctcctgagccgcgctcaccttacgacgctct

SEQ ID NO: 1092 - DNA, 260 bp, Artificial Sequence
  Description of Artificial Sequence: Synthetic polynucleotide
acgacagcgagaacgccagggctccgaccgccacggttccggccgtcgcgacacgcacgggggatagaatcgacattgcacgagctcctatctcgtgtatcgcccctggtctgttcgcgcaggccaggggctcttctgacctagtgaagaatcccgaaagtcgggagcccgagtttcaacattcttctctccttgctactgtgtctgacatgcgagttcttggaagattgcgaatttcacgagccactgaggaatctacc

SEQ ID NO: 1093 - DNA, 260 bp, Artificial Sequence
  Description of Artificial Sequence: Synthetic polynucleotide
acggttccagccgtcgcggacctgagcggggtgatctcccgtagaatttccattgcacctggtcctttcaggtgtaacgcctcctaccagtcctgcgcctaaacagctggtagggggcttctttcgttgttgtggagcgatacggtacatcatctcaagtgtgtttgcttcgggcaaccgagcagcgtacatttgaaatcatgacccaaacactccgcgccctggtaggcgcacgtgtcagcgtagtccaaggtccgcag

SEQ ID NO: 1094 - DNA, 260 bp, Artificial Sequence
  Description of Artificial Sequence: Synthetic polynucleotide
tacgagcagcatctcaggctcggtagcgtggtcgaacggctacacgccgggatgtcgtagagcggatacccgagaacgcagaaaagccccctacgcgccgtgtaagggcacgcagagggctctctggtagtctctattcagttgtggggttgcgtccgtcagcgtgtctacccagctccgcgtacggccccttgacaagctgagcgacctgagcggtggtaagaggcgcgaacgccttccgaaccgctacgagtacggct

SEQ ID NO: 1095 - DNA, 260 bp, Artificial Sequence
  Description of Artificial Sequence: Synthetic polynucleotide
tacgagcagcatctcaggctcggcagcgtggtcgaacggctacacaccgggatgtcgtagagcggctacccgagaacgcagaaaagccccctacgcgccgtgtaagggcacgcagagggctctctggcagtgtctctattcagttgtggggttgcgtccgtcagcgtggacgctagaggggtttacggggcctcgtggacccgcacgtacggctgcagaggcttgtcacggtaggcgtggtatcgctcggcctcctcggc

SEQ ID NO: 1096 - DNA, 260 bp, Artificial Sequence
  Description of Artificial Sequence: Synthetic polynucleotide
tacgagcagcatctcaggctcggcagcgtggtcgaacggctacacaccgggatgtcgtagagcggctacccgagaacgcagaaaagccccctacgcgccgtgtaagggcacgcagagggctctctggtagtctctattcagttgtgtggttgcgtccgtcagcgtggacgctagaggggtttacggggcctcgtggacccgcacgtacggctgcagaggcttgtcacggtaggcgtggtagcgctccgcctcctcgacgc

SEQ ID NO: 1097 - DNA, 260 bp, Artificial Sequence
  Description of Artificial Sequence: Synthetic polynucleotide
tacgagcagcatctcaggctcggcagcgtggtcgaacggctacacaccgggatgtcgtagagcggctacccgagaacgcagaaaagccccctacgcgccgtgtaagggcacgcagagggctctctggtagtctctattcagttgtggggttgcgtccgtcagcgtggacgctagaggggtttacggggcctcgtggacccgcacgtacggctgcataggcttgtcacggtaggcgtgatagcgctcggcctcctcggcgc

SEQ ID NO: 1098 - DNA, 260 bp, Artificial Sequence
  Description of Artificial Sequence: Synthetic polynucleotide
tacgagcagcatctcaggctcggcagcgtggtcgaacggctacacaccgggatgtcgtagagcggctgcccgagaacgcagaaaagccccctacgcgccgtgtaagggcacgcagagggctctctggcagtctctattcagttgtggggttgcgtccgtcagcgtggacgctagaggggtttacggggcctcgtggacccgcacgtacggctgcagaggcttgtcacggtaggcgtggtatcgctcggcctcctcggcgc

SEQ ID NO: 1099 - DNA, 260 bp, Artificial Sequence
  Description of Artificial Sequence: Synthetic polynucleotide
tacgagcagcacctcaggctcggtagcgtggtcgaacggctacacaccgggatgtcgtagagcgactaccctgagaacgcagaaaagccccctacgcgccgtgtaagggcacgcagagggctctctggtagtctctattcagttgtactgctgagtccgtcagcgtgggtgctagaggggtttacggggcctcgtggacccgcacgtacggctgcagaggcttgtcacggtaggcgtggtagcgctcggcctcctcggcg

SEQ ID NO: 1100 - DNA, 260 bp, Artificial Sequence
  Description of Artificial Sequence: Synthetic polynucleotide
tacgagcagcatctcaggctcggcagcgtggtcgaacggctacacaccgggatgtcgtagagcgactacccccgagaacgcagaaaagccccctacgcaccgtgtaagggcacgcagagggctctctggtagtctctattcagttgtgtggttgcgtccgtcagcgtggacgctagaggggtttacggggcctcgtggacccgcacgtacggctgcagaggcttgtcacggtaggcgtgatatcgctccgcctcctcggc

SEQ ID NO: 1101 - DNA, 260 bp, Artificial Sequence
  Description of Artificial Sequence: Synthetic polynucleotide
tacgagcagcatctcaggctcggcagcgtggtcgaacggctacacgccgggatgtcgtagagcggctacccgagaacgcagaaaagccccctacgcgccgtgtaagggcacgcagagggctctctggtagtctctattcagttgtggggttgcgtccgtcagcgtggacgctagaggggtttacggggcctcgtggacccgcacgtacggctgcagaggcttgtcacggtaggcgtggtatcgctcggcctcctcgacgc

SEQ ID NO: 1102 - DNA, 260 bp, Artificial Sequence
  Description of Artificial Sequence: Synthetic polynucleotide
tacgagcagcatctcaggctcggtagcgtggtcgaacggctacacgccgggatgtcgtagagcggctacccgagaacgcagaaaagccccctacgcgccgtgtaagggcacgcagagggctctctggtagtctctattcagttgtggggttgcgtccgtcagcgtggacgctagaggggtttacggggcctcgtggacccgtacgtacggctgcagaggcttgtcacggtaggcgtggtagcgctctttctcgtcggtcg

SEQ ID NO: 1103 - DNA, 260 bp, Artificial Sequence
  Description of Artificial Sequence: Synthetic polynucleotide
tacgagcagcatctcaggctcggcagcgtggtcgaacggctacacaccgggatgtcgtagagcggatacccgagaacgcagaaaagccccctacgcgccgtgtaagggcacgcagagggctctctggtagtctctattcagttgtgtggttgcgtccgtcagcgtggacgctagaggggtttacggggcctcgtggacccgcacgtacggctgcagaggcttgtcacggtaggcgtggtagcgctccgcctcctcggcgc

SEQ ID NO: 1104 - DNA, 260 bp, Artificial Sequence
  Description of Artificial Sequence: Synthetic polynucleotide
tacgagcagcatctcaggctcggcagcgtggtcgaacggctacacaccgggatgtcgtagagcggctacccgagaacgcagaaaagccccctacgcgccgtgtaagggcacgcagagggctctctggtagtctctattcagttgtggggttgcgtacgtctccgtggacgctagaggggtttacggggcctcgtggacccgcacgtacggctgcagaggcttgtcacggtaggcgtgatagcgctccgcctcctcgacgc

SEQ ID NO: 1105 - DNA, 260 bp, Artificial Sequence
  Description of Artificial Sequence: Synthetic polynucleotide
tacgagcagcatctaaggctcggcagcgtggtcgaacagctacacgccgggatgtcgtagagcggctacccgagaacgcagaaaagccccctacgcgccgtgtaagggcacgcagagggctctctggtagtctctattcagttgtggggttgcgtccgtcagcgtgtctacccagctccgcgtacggccccttgacaagctgagcgacctgagcggtggtaagaggcgcgaacgccttccgaaccgctacgagtacggct

SEQ ID NO: 1106 - DNA, 260 bp, Artificial Sequence
  Description of Artificial Sequence: Synthetic polynucleotide
tacgagcagcatctcaggctcggtagcgtggtcgaacggctacacgccgggatgtcgtagagcgactaccccgagaacgcagaaaagccccctacgcgccgtgtaagggcacgcagagggctctctggtagtctctattcagttgtggggttgcgtccgtcagcgtggacgctagaggggtttacggggcctcgtggacccgtacgtacggctgcagaggcttgtcacggtaggcgtgatagcgctcggcctcctcgacg

SEQ ID NO: 1107 - DNA, 260 bp, Artificial Sequence
  Description of Artificial Sequence: Synthetic polynucleotide
tacgagcagcatctcaggctcggcagcgtggtcgaacggctacacaccgggatgtcgtagagcggctacccccgagaacgcagaagagccccctacgggccgctagggctcgcagagggcttctccggtagtctctattcagttgtactgctgagtccgtcagcgtgggcgctagaggggttttacggggcctcgtggacccgcacgtacggctgcagaggcttgtcacggtaggcgtggtatcgctcggcctcctcggc

SEQ ID NO: 1108 - DNA, 260 bp, Artificial Sequence
  Description of Artificial Sequence: Synthetic polynucleotide
tacgagcagcatctcaggctcggcagcgtggtcgaacagctacacaccgggatgtcgtagagcgactacccgagaacgcagaaaagccccctacgcgccgtgtaagggcacgcagagggctctctgatagtctctattcagttgtgtggttgcgtccgtcagcgtggacgctagaggggtttacggggcctcgtggacccgcacgtacggctgcagaggcttgtcacggtaggcgtggtaacgctccgcctcctcggcgc

SEQ ID NO: 1109 - DNA, 260 bp, Artificial Sequence
  Description of Artificial Sequence: Synthetic polynucleotide
tacgagcagcatctcaggctcggcagcgtggtcgaacggctacacaccgggatgtcgtagagcggctacccgagaacgcagaaaagccccctacgcgccgtgtaagggcacgcagagggctctctggtagtctctattcagttgtggggttgcgtccgtcagcgtggacgctagaggggtttacggggcctcgtggacccgtacgtacggctgcagaggcttgtcacggtaggcgtggtagcgctcggcctcctcgacgc

SEQ ID NO: 1110 - DNA, 260 bp, Artificial Sequence
  Description of Artificial Sequence: Synthetic polynucleotide
tacgagcagcatctcaggctcggcagcgtggtcgaacagctacacaccgggatgtcgtagagcggctacccccgagaacgcagaagagccccctacgcgccgtgtaagggcacgcagagggctctctggtagtctctattcagttgtggggttgcgtccgtcagcgtggacgctagaggggtttacggggcctcgtggacccgcacgtacggctgcagaggcttgtcacggtaggcgtggtagcgctcggcctcctcggc

SEQ ID NO: 1111 - DNA, 260 bp, Artificial Sequence
  Description of Artificial Sequence: Synthetic polynucleotide
tacgagcagcacctcaggctcggcagcgtggtcgaacgactacacgccgggatgtcgtagagcggctacccgagaacgcagaaaagccccctacgcgccgtgtaagggcacgcagagggctctctggtagtctctattcagttgtggggttgcgtccgtcagcgtggacgctagaggggtttacgggtcctcgtggacccgtacgtacggctgcagaggcttgtcacggtaggcgtggtagcgctctttctcgtcggtcg

SEQ ID NO: 1112 - DNA, 260 bp, Artificial Sequence
  Description of Artificial Sequence: Synthetic polynucleotide
tacgagcagcatctcaggctcggcagcgtggtcgaacggctacacaccgggatgtcgtagagcggctacccgagaacgcagaaaagccccctacgcgccgtgtaagggcacgtagagggctctctggtagtctctattcagttgtgtggttgcgtccgtcagcgtggacgctagaggggtttacggggcctcgtggacccgcacgtacggctgcagaggcttgtcacggtaggcgtgatagcgctccgcctcctcggcgc

SEQ ID NO: 1113 - DNA, 260 bp, Artificial Sequence
  Description of Artificial Sequence: Synthetic polynucleotide
tccgaccgcgactgttcctgctgtggcaaagctgaccggggatagaatcttcattgcacgggcctcttccgtgtagtagccctctgccagtcctgcgcctaaacagctggtagggggctcttttcgttgttgtggagcgatacggtacaccatttcaagtgtgtttgcttcgggcagccgagcagcgtacatttgaaatcatgacccaaacactccgcgccctggtaggcgcacgtgtcagcgtagtccaaggtccgcag

SEQ ID NO: 1114 - DNA, 260 bp, Artificial Sequence
  Description of Artificial Sequence: Synthetic polynucleotide
tacgagcagcatctcaggctcggtagcgtggtcgaacggctacacgacgggatgtcgtagagcggctacccgagaacgcagaaaagccccctacgcgccgtgtaagggcacgcagagggctctctggtagtctctattcagttgtggggttgcgtccgtcagcgtgggcgctagaggggtttacggggcctcgtggacccgtacgtacggctgcagaggcttgtcacggtaggcgtggtaccgctcggcctcctcggcgc

SEQ ID NO: 1115 - DNA, 260 bp, Artificial Sequence
  Description of Artificial Sequence: Synthetic polynucleotide
tacgagcagcatctcaggctcggcagcgtggtcgaacagctacacaccgggatgtcgtagagcgactaccccccgagaacgcagaaaagccccctacgcgccgtgtaagggcacgcagagggctctctggtagtctctattcagttgcggggctgcgtccgtcagcgtggacgctagaggggtttacggggcctcgtggacccgtacgtacggctgcagaggcttgtcacggtaggcgtggtagcgctccgcctcctcgg

SEQ ID NO: 1116 - DNA, 260 bp, Artificial Sequence
  Description of Artificial Sequence: Synthetic polynucleotide
tacgagcagcatctcaggctcggcagcgtggtcgaacagctacacaccgggatgtcgtagagcggctacccccgagaacgcagaagagccccctacgcgccgtgtaagggcacgcagagggctctctggtagtctctattcagttgtggggttgcgtccgccagcgtggacgctagaggggtttacggggcctcgtggacccgcacgtacggctgcagaggcttgtcacggtaggcgtggtagcgctcggcctcctcggc

SEQ ID NO: 1117 - DNA, 260 bp, Artificial Sequence
  Description of Artificial Sequence: Synthetic polynucleotide
tacgagcagcatctcaggctcggcaacgtggtcgaacagctacacgccgggatgtcgtagagcgactacccgagaacgcagaaaagccccctacgcgccgtgtaagggcacgcagagggcttctccggtagtctctattcagttgtactgctgagtccgtcagcgtggacgctagaggggtttacggggcctcgtggacccgcacgtacggctgcagaggcttgtcacggtaggcgtgatagcgctccgcctcctcgacg

SEQ ID NO: 1118 - DNA, 260 bp, Artificial Sequence
  Description of Artificial Sequence: Synthetic polynucleotide
tacgagcagcatctcaggctcggcagcgtggtcgaacggctacacgccgggatgtcgtagagcgactacccccgagaacgcagaaaagccccctacgcgccgtgtaagggcacgcagaggactctctggtagtctctattcagttgtggggttgcgtccgtcagcgtggacgctagaggggtttacggggcctcgtggacccgtacgtacggctgcagaggcttgtcacggtaggcgtggtagcgctcggcctcctcggc

SEQ ID NO: 1119 - DNA, 260 bp, Artificial Sequence
  Description of Artificial Sequence: Synthetic polynucleotide
tacgagcagcatctcaggctcggcagcgtggtcgaacggctacacaccgggatgtcgtagagcgactacccccgagaacgcagaaaagccccctacgcgccgtgtaagggcacgcagagggctctctggtagtctctattcagttgtgtggttgcgtccgtcagcgtggacgctagaggggtttacggggcctcgtggacccgcacgtacggctgcagaggcttgtcacggtaggcgtgatatcgctccgcctcctcggc

SEQ ID NO: 1120 - DNA, 260 bp, Artificial Sequence
  Description of Artificial Sequence: Synthetic polynucleotide
tacgagcagcatctcaggctcggcagcgtggtcgaacggctacacgccgggatgtcgtagagcggctacccgagaatgcagaaaagccccctacgcgccgtgtaagggcacgcagagggctctctggtagtctctattcagttgtggggttgcatccgtcagcgtggacgctagaggggtttacggggcctcgtggacccgcacgtacggctgcagaggcttgtcacgataggcgtggtagcgctcggcctcctcggcgc

SEQ ID NO: 1121 - DNA, 260 bp, Artificial Sequence
  Description of Artificial Sequence: Synthetic polynucleotide
tacgagcagcatctcaggctcggcagcgtggtcgaacagctacacaccgggatgtcgtagagcggctacccgagaacgcagaaaagccccctacgcgccgtgtaaaggcacgcagagggctctctggtagtatcctattcagttgtgggtgtgcgtccgtcagcgtggacgctagaggggtttacggggcctcgtggacccgcacgtacggctgcagaggcttgtcacggtaggcgtggtagcgctcggcctcctcggcg

SEQ ID NO: 1122 - DNA, 260 bp, Artificial Sequence
  Description of Artificial Sequence: Synthetic polynucleotide
tacgagcagcatctcaggctcggcagcgtggtcgaacagctacacaccgggatgtcgtagagcggccacccgagaacgcagaaaagccccctacgcgccgtgtaagggcacgcagagggctctctggtagtctctattcagttgtggggttgcgtccgtcagcgtggacgctagaggggtttacggggcctcgtggacccgtacgtacggctgcagaggcttgtcacggtaggcgtggtatcgctccgcctcctcggcgc

SEQ ID NO: 1123 - DNA, 260 bp, Artificial Sequence
  Description of Artificial Sequence: Synthetic polynucleotide
tacgagcagcatctcaggctcggcagcgtggtcgaacggctacacgccgggatgtcgtagagcggctacccgagaacgcagaaaagccccctacgcgccgtgtaagggcacgcagagggctctctggtagtctctattcagttgtactgctgagtccgtcagcgcggacgctagaggggtttacggggcctcgtggacccgcacgtacggctgcagaggcttgtcacggtaggcgtgatagcgctcggcctcctcgacgc

SEQ ID NO: 1124 - DNA, 260 bp, Artificial Sequence
  Description of Artificial Sequence: Synthetic polynucleotide
tacgagcagcatctcaggctcggcagcgtggtcgaacggctacacgccgggatgtcgtagagcggctacccgagaacgcagaaaagccccctacgcgccgtgtaagggcacgcagagggctctctggtagtctctattcagttgtggggttgcgtccgtcagcgtggacgctagaggggtttacggggcctcgtggacccgtacgtacggctgcagaggcttgtcacggtaggcgtgatagcgctccgcctcctcggcgc

SEQ ID NO: 1125 - DNA, 260 bp, Artificial Sequence
  Description of Artificial Sequence: Synthetic polynucleotide
tccgaccgcgactgttcctgctgtggcaaagctgaccggggatagaatcttcattgcacgggcctcttccgtgtagtagccctctgccagtcctgcgcctaaacagctggtagggggctcttttcgttgttgtggagcgatacggtacaccatctcaagtgtgtttgcttcgggcaaccgagcagcgtacatttgaaatcatgacccaaacactccgcgccctggtaggcgcacgtgtcagcgtagtccaaggtccgcag

SEQ ID NO: 1126 - DNA, 260 bp, Artificial Sequence
  Description of Artificial Sequence: Synthetic polynucleotide
gtccggaccgtacctgttcgaccttcgcaaccaacgatgctgacacccgccctcgggtcggtcttcggaccggctcgggggctcctttttttgtgcccaaatcccatgcacgatcacgcatgtatcagtattgggggaacgcgatattcgaggagtagaacatcaccttcaccaaattcatgtatcctaccttcgtgcgtgtgttggggagactgcgtctgtcgaggtcaacggaggaatccacctcgattgagaggcaa

SEQ ID NO: 1127 - DNA, 260 bp, Artificial Sequence
  Description of Artificial Sequence: Synthetic polynucleotide
tacgagcagcatctcaggctcggcagcgtggtcgaacggctacacaccgggatgtcgtagagcgactgcccccgagaacgcagaaaagccccctacgcgccgtgtaagggcacgcagagggctctctggtagtctctattcagttgtggggttgcgtacgtcagcgtggacgctagaggggtttacggggcctcgtggacccgtacgtacggctgcagaggcttgtcacggtaggcgtggtagcgctcggcctcctcggc

SEQ ID NO: 1128 - DNA, 260 bp, Artificial Sequence
  Description of Artificial Sequence: Synthetic polynucleotide
tacgagcagcatctcaggctcggcagcgtggtcgaacggctacacgccgggatgtcgtagagcgactacccccgagaacgcagaaaagccccctacgcgccgtgtaagggcacgcagagggctctctggtagtctctattcagttgtggggttgcgtccgtcagcgtggacgctagaggggtttacggggcctcgtggacccgcacgtacggctgcagaggcttgtcacggtaggcgtgatagcgctcggcctcctcggc

SEQ ID NO: 1129 - DNA, 260 bp, Artificial Sequence
  Description of Artificial Sequence: Synthetic polynucleotide
gttcggaccgtacctgttcgaccttcgcaaccaacgatgctgacacccgccctcgggtcggtcttcggaccggctcgggggctcctttttttgtgcccaaatcccatgcacgatcacgcatgtatcagtattgggggaacgcgatattcgaggagtagaacatcaccttcaccaaattcatgtatcctaccttcgtgcgtgtgttggggagactgcgtctgtcgaggtcaacggaggaatccacctcgattgagaggcaa

SEQ ID NO: 1130 - DNA, 260 bp, Artificial Sequence
  Description of Artificial Sequence: Synthetic polynucleotide
tacgagcagcatctcaggctcggcagcgtggtcgaacggctacacaccgggatgtcgtagagcggctacccgagaacgcagaaaagccccctacgcgccgtgtaagggcacgcagagggctctctggtagtctctattcagttgtgtggttgcgtccgtcagcgtggacgctagaggggtttacggggcctcgtggacccgtacgtacggctgcagaggcttgtcacggtaggcgtggtagcgctccgcctcctcgacgc

SEQ ID NO: 1131 - DNA, 260 bp, Artificial Sequence
  Description of Artificial Sequence: Synthetic polynucleotide
tacgagcagcacctccggctcggtagcgtggtcgaacagctacacaccgggatgtcgtagagcgactacccggagaacgcagaaaagccccctacgcgccgtgtaagggcacgcagagggctctctggtagtctctattcagttgtggggttgcgtccgtcagcgcggacgctagaggggtttacggggcctcgtggacccgtacgtacggctgcagaggcttgtcacggtaggcgtggtagcgctcggcctcctcgacg

SEQ ID NO: 1132 - DNA, 260 bp, Artificial Sequence
  Description of Artificial Sequence: Synthetic polynucleotide
tacgagcagcatctcaggctcggcagcgtggtcgaacggctacacaccgggatgtcgtagagcggctacccgagaacgcagaaaagccccctacgcgccgtgtaagggcgcgcagagggctctctggtagtctctattcagttgtggggttgcgtccgtcagcgtggacgctagaggggtttacggggcctcgtggacccgcacgtacggctgcagaggcttgtcacggtaggcgtggtagcgttccgcctcctcggcgc

SEQ ID NO: 1133 - DNA, 260 bp, Artificial Sequence
  Description of Artificial Sequence: Synthetic polynucleotide
tacgagcagcatctcaggctcggcagcgtggtcgaacggctacacaccgggatgtcgtagatcgactacccgagaacgcagaaaagccccctacgcgccgtgtaagggcacgcagagggctctctggtagtctctattcagttgtggggttgcgtccgtcagcgtggacgctagaggggtttacggggcctcgtggacccgtacgtacggctgcagaggcttgtcacggtaggcgtgatagcgctcggactcctcggcgc

SEQ ID NO: 1134 - DNA, 260 bp, Artificial Sequence
  Description of Artificial Sequence: Synthetic polynucleotide
tacgagcagcatctcaggctcggcagcgtggtcgaacagctacacgccgggatgtcgtagagcggctacccgagaacgcagaaaagccccctacgcgccgtgtaagggcacgcagagggctctctggtagtctctattcagttgtggggttgcgtccgtcagcgtggacgctagagggggtttacggggcctcgtggacccgcacgtacggctgcagaggcttgtcacggtaggcgtggtatcgctcggcctcctcggcg

SEQ ID NO: 1135 - DNA, 260 bp, Artificial Sequence
  Description of Artificial Sequence: Synthetic polynucleotide
tacgagcagcatctcaggctcggcagcgtggtcgagcggctacacaccgggatgtcgtagagcgactacccgagaacgcagaaaagccccctacgcgccgtgtaagggcacgcagagggctctctggcagtctctattcagttgtggggttgcgtccgtcagcgtggacgctagaggggtttacggggcctcgtggacccgcacgtacggctgcagaggcttgtcacggtaggcgtggtagcgttccgcctcctcggcgc

SEQ ID NO: 1136 - DNA, 260 bp, Artificial Sequence
  Description of Artificial Sequence: Synthetic polynucleotide
tacgagcagcatctcaggctcggcagcgtggtcgaacggctacacgccgggatgtcgtagagcggctacccgagaacgcagaaaagccccctacgcgccgtgtaagggcacgcagagggctctctggtagtctctattcagttgtgtggttgcgtccgtcagcgtggacgctagaggggtttacggggcctcgtggacccgcacgtacggctgcagaggcttgtcacggtaggcgtggtagcgctcggcctcctcggcgc

SEQ ID NO: 1137 - DNA, 260 bp, Artificial Sequence
  Description of Artificial Sequence: Synthetic polynucleotide
tacgagcagcatctcaggctcggcagcgtggtcgaacggctacacaccgggatgtcgtagagcgactacctgagaatgcagaaaagccccctacgcgccgtgtaagggcacgcagagggctctctggtagtctctattcagttgtggggttgcgtccgtcagcgtggacgctagaggggtttacggggcctcgtggacccgcacgtacggctgcagaggcttgtcacggtaggcgtggtagcgctcggcctcctcggcgc

SEQ ID NO: 1138 - DNA, 260 bp, Artificial Sequence
  Description of Artificial Sequence: Synthetic polynucleotide
tacgagcagcacctcaggctcggcagcgtggtcgaacagctacacgccgggatgtcgtagagcgactaccccccgagaacgcagaaaagccccctacgcgccgctagggcacgcagagggcttctccggtagtctctattcagttgtgggtgtgcgtccgtctccgtggacgctagaggggtttacggggcctcgtggacccgcacgtacggctgcagaggcttgtcacggtaggcgtggtagcgctcggcctcctcggc

SEQ ID NO: 1139 - DNA, 260 bp, Artificial Sequence
  Description of Artificial Sequence: Synthetic polynucleotide
tccgaccgcgactgttgctgctgcggcaaagctgaccggggatagaatcttcattgcacgggcctcttccgtgtagtagccctctgccagtcctgcgcctaaacagctggtagggggctcttttcgttgttgtggagcgatacggtacaccatttcaagtgtgtttgcttcgggcaaccgagcagcgtacatttgaaatcatgacccaaacactccgcgccctggtaggcgcacgtgtcagcgtagtccaaggtccgcag

SEQ ID NO: 1140 - DNA, 260 bp, Artificial Sequence
  Description of Artificial Sequence: Synthetic polynucleotide
tacgagcagcatctcaggctcggcagcgtggtcgaacggctacacgccgggatgtcgtagagcggctacccgagaacgcagaaaagccccctacgcgccgtgtaagggcacgcagagggctctctggtagtctctattcagttgtgtggttgcgtccgtcagcgtggacgctagaggggtttacggggcctcgtggacccgtacgtacggctgcagaggcttgtcacggtaggcgtggtagcgctcggcctcctcggcgc

SEQ ID NO: 1141 - DNA, 260 bp, Artificial Sequence
  Description of Artificial Sequence: Synthetic polynucleotide
tccgaccgcgactgttcctgctgtggcaaagctgaccggggatagaatcttcattgcacgggcctcttccgtgtagtagccctctgccagtcctgcgcctaaacagctggtagggggctcttttcgttgttgtggagcgatacggtacaccatttcaagtgtgtttgcttcgggcaaccgagcagcgtacatttgaaatcatgacccaaacactccgcgccctggtaggcgcacgtgtcagcgtagtccaaggtccgcag

SEQ ID NO: 1142 - DNA, 260 bp, Artificial Sequence
  Description of Artificial Sequence: Synthetic polynucleotide
tacgagcagcatctcaggctcggcagcgtggtcgaacggctgcacaccgggatgtcgtagagcggctacccgagaacgcagaagagccccctacgcgccgtgtaagggcacgcagagggctctctggtagtctctattcagttgtggggttgcgtccgtcagcgtggacgctagaggggtttacggggcctcgtggacccgcacgtacggctgcagaggcttgtcacggtaggcgtggtatcgctcggcctcctcggcgc

SEQ ID NO: 1143 - DNA, 260 bp, Artificial Sequence
  Description of Artificial Sequence: Synthetic polynucleotide
tacgagcagcatctcaggctcggcagcgtggtcgaacagctacacaccgggatgtcgtagagcgcctaccctgagaatgcagaaaagccccctacgcgccgtgtaagggcacgtagagggctctctggtagtctctattcagttgtggggttgcgtccgtcagcgtggacgctagaggggtttacgggtcctcgtggacccgtacgtacggctgcagaggcttgtcacggtaggcgtggtagcgctccgcctcctcggcg

SEQ ID NO: 1144 - DNA, 260 bp, Artificial Sequence
  Description of Artificial Sequence: Synthetic polynucleotide
tacgagcagcatctcaggctcggcagcgtggtcgaacagctacacgccgggatgtcgtagagcggctacccgagaacgcagaaaagccccctacgcgccgtgtaagggcacgcagagggctctctggtagtctctattcagttgtggggttgcgtccgtcagcgtggacgctagaggggtttacggggcctcgtggacccgcacgtacggctgcagaggcttgtcacggtaggcgtggtagcgctcggcctcctcggcgc

SEQ ID NO: 1145 - DNA, 260 bp, Artificial Sequence
  Description of Artificial Sequence: Synthetic polynucleotide
tacgagcagcacctcaggctcggcggcgtggtcgaacagctacacaccgggatgtcgtagagcgactaccctgagaacgcagaaaaaccccctacgcgccgtgtaagggcacgcagagggctctctggtagtctctattcagttgtgcggttgcgtccgtcagcgtggacgctagaggggtttacggggcctcgtggacccgtacgtacggctgcagaggcttgtcacggtaggcgtggtagcgctcggcctcctcgacg

SEQ ID NO: 1146 - DNA, 260 bp, Artificial Sequence
  Description of Artificial Sequence: Synthetic polynucleotide
tccgaccgcgactgttcctgctgtggcaaagctgaccggggatagaatcttcattgcacgggcctcttccgtgtagtagccctctgccagtactgcgcctaaacagctggtagggggctcttttcgttgttgtggagcgatacggtacaccatctcaagtgtgtttgcttcgggcaaccgagcagcgtacatttgaaatcatgacccaaacactccgcgccctggtaggcgcacgtgtcagcgtagtccaaggtccgcag

SEQ ID NO: 1147 - DNA, 260 bp, Artificial Sequence
  Description of Artificial Sequence: Synthetic polynucleotide
tacgagcagcatctcaggctcggcagcgtggtcgaacagctgcacgccgggatgtcgtagagcgactacccgagaacgcagaaaagccccctacgcgccgtgtaagggcacgcagagggctctctggtagtctctattcagttgtggggttgcgtccgtcagcgtggacgctagaggggtttacggggcctttccagcctgacgtccgcgccactcctgtaagggtgtgtgagcagtgcagtacgggtctacccggctgc

SEQ ID NO: 1148 - DNA, 260 bp, Artificial Sequence
  Description of Artificial Sequence: Synthetic polynucleotide
tacgagcagcatctcaggctcggcagcgtggtcgaacgactacacaccgggatgtcgtagagcggctacccgagaacgcagaaaagccccctacgcgccgtgtaagggcacgcagagggctctctggtagtctctattcagttgtggggttgcgtccgtcagcgtggacgctagaggggtttacggggcctcgtggacccgcacgtacggcggcagaggcttgtcacggtaggcgtggtagcgctctttctcgtcggaga

SEQ ID NO: 1149 - DNA, 260 bp, Artificial Sequence
  Description of Artificial Sequence: Synthetic polynucleotide
tacgagcagcatctcaggctcggcagcgtggtcgaacagctacacgccgggatgtcgtagagcggctacctgagaacgcagaaaagccccctacgcgccgtgtaagggcacgcagagggctctctggtagtctctattcagttgtggggttgcgtccgtcagcgtggacgctagaggggtttacgggggcctttccagcctgacgggcgcgcccgcctataagggtgtgtgagcagtgcagtgcgggtctacccagctgc

SEQ ID NO: 1150 - DNA, 260 bp, Artificial Sequence
  Description of Artificial Sequence: Synthetic polynucleotide
tacgagcagcatctcaggctcggcagcgtggtcgaacggctacacaccgggatgtcgtagagcggctacccgagaacgcagaaaagccccctacgcgccgtgtaagggcacgcagagggctctctggtagtctctattcagttgtgtggttgcgtccgtcagcgtggacgctagaggggtttacggggcctcgtggacccgcacgtacggctgcagaggcttgtcacggtaggcgtggtagcgctcggcctcctcggcgc

SEQ ID NO: 1151 - DNA, 260 bp, Artificial Sequence
  Description of Artificial Sequence: Synthetic polynucleotide
acagtccccgccgtcgcagaccggagcggggtgatctcccgtagaatttccattgcacctggtcctttcaggtgtaacgcctcctaccagtcctgcgcctaaacagctggtagggggctcttttcgttgttgtggagcgatacggtacaccatttcaagtgtgtttgcttcgggcaaccgagcagcgtacatttgaaatcatgacccaaacactccgcgccctggtaggcgcacgtgtcagcgtagtccaaggtccgcag

SEQ ID NO: 1152 - DNA, 260 bp, Artificial Sequence
  Description of Artificial Sequence: Synthetic polynucleotide
tacgagcagcatctcaggctcggtagcgtggtcgaacggctacacaccgggatgtcgtagagcggctacccgagaacgcagaaaagccccctacgcgccgtgtaagggcacgcagagggctctctggtagtctctattcagttgtactgctgagtccgtcagcgtggacgctagaggggtttacggggcctcgtggacccgaacgtacggctgcagaggcttgtcacggtaggcgtgatagcgctccgcctcctcggcgc

SEQ ID NO: 1153 - DNA, 260 bp, Artificial Sequence
  Description of Artificial Sequence: Synthetic polynucleotide
tatgagcagcatctcaggctcggtagcgtggtcgaacagctacacaccgggatgtcgtagagcgactaccctgagaacgcagaaaagccccctacgcgccgtgtaagggcgcgcagagggctctctggtagtctctattcagttgcggggttgcgtccgtcagcgtggacgctagaggggtttacggggcctcgtggacccgtacgtacggctgcagaggcttgtcacggtaggcgtggtagcgctctgcctcctcggcg

SEQ ID NO: 1154 - DNA, 260 bp, Artificial Sequence
  Description of Artificial Sequence: Synthetic polynucleotide
tacgagcagcatctcaggctcggcagcgtggtcgagcagctacacgccgggatgtcgtagagcggctacccgagaacgcagaaaagccctctacgcgccgtgtaagggcgcgcagagggctctctggcagtctctattcagttgtggggttgcgtccgtcagcgtggacgctagaggggtttacggggcctcgtggacccgcacgtacggctgcagaggcttgtcacggtaggcgtggtagcgctcggcctcctcggcgc

SEQ ID NO: 1155 - DNA, 260 bp, Artificial Sequence
  Description of Artificial Sequence: Synthetic polynucleotide
tacgagcagcatctcaggctcggcagcgtggtcgagcagctacacgccgggatgtcgtagagcggatacccgagaacgcagaaaagccccctacgcgccgtgtaagggcacgcagagggctctctggtagtctctattcagttgtggggttgcgtccgtcagcgtggacgctagaggggtttacggggcctcgtggacccgtacgtacggctgcagaggcttgtcacggtaggcgtggtagcgctcggcctcctcggcgc

SEQ ID NO: 1156 - DNA, 260 bp, Artificial Sequence
  Description of Artificial Sequence: Synthetic polynucleotide
tacgagcagcatctcaggctcggcaacgtggtcgaacggctacacaccgggatgtcgtagagcgactacccgagaacgcagaaaagccccctacgcgccgtgtaagggcacgcagagggctctctggcagtctctattcagttgtggggttgcgtccgtcagcgtggacgctagaggggtttacggggcctcgtggacccgcacgtacggctgcagaggcttgtcacggtaggcgtggtagcgctctttctcgtcggtcg

SEQ ID NO: 1157 - DNA, 260 bp, Artificial Sequence
  Description of Artificial Sequence: Synthetic polynucleotide
gtccagcccagccacgtctccttcgagatggggctacttgtgctggcacgacacggtgagtggctaggtccgtgggtcgcattgggacaaagcccgcagggctagggggacaaggcgagggccacaggtctagccgcccgtagggcgtccttacggtcaggggagcccccgtcaggggtcagtctccaggagcggtagaagtgccaaagtacgatggacgtatgcgtgtgctcggtcgggttcgtctctctcggttccaa

SEQ ID NO: 1158 - DNA, 260 bp, Artificial Sequence
  Description of Artificial Sequence: Synthetic polynucleotide
tacgagcagcatctcaggctcggcagcgtggtcgagcagctacacgccgggatgtcgtagagcggctacccgagaacgcagaaaagccccctacgcgccgtgtaagggcgcgcagagggctctctggcagtctctattcagttgtggggttgcgtccgtcagcgtggacgctagaggggtttacggggcctcgtggacccgcacgtacggctgcagaggcttgtcacggtaggcgtggtagcgctcggcctcctcggcgc

SEQ ID NO: 1159 - DNA, 260 bp, Artificial Sequence
  Description of Artificial Sequence: Synthetic polynucleotide
tacgagcagcatctcaggctcggcagcgtggtcgagcggctacacaccgggatgtcgtagagcgactgcccccgagaacgcagaaaagccccctacgcgccgtgtaagggcacgcagagggctctctggtagtctctattcagttgtggggttgcgtacgtcagcgtggacgctagaggggtttacggggcctcgtggacccgcacgtacggttgcagaggcttgtcacggtaggcgtggtatcgctcggcctcctcggc

SEQ ID NO: 1160 - DNA, 260 bp, Artificial Sequence
  Description of Artificial Sequence: Synthetic polynucleotide
tacgagcagcatctcaggctcggcagcgtggtcgagcggctacacaccgggatgtcgtagagcgactaccctgagaacgcaagaaaagccccctacgcgccgtgtaagggcacgcagagggctctctggtagtctctattcagttgtggggttgcgtccgtcagcgtggacgctagaggggtttacggggcctcgtggacccgcacgtacggcggcagaggcttgtcacggtaggcgtgatagcgctccgcctcctcggc

SEQ ID NO: 1161 - DNA, 260 bp, Artificial Sequence
  Description of Artificial Sequence: Synthetic polynucleotide
tacgagcagaatctcaggctcggcaacgtggtcgaacggctacacaccgggatgtcgtagagcgactacccgagaacgcagaaaagccccctacgcgccgtgtaagggcacgcagagggctctctggcagtctctattcagttgtggggttgcgtacgtcagcgtggacgctagaggggtttacggggcctcgtggacccgtacgtacggctgcagaggcttgtcacggtaggcgtggtagcgctcggcctcctcggcgc

SEQ ID NO: 1162 - DNA, 260 bp, Artificial Sequence
  Description of Artificial Sequence: Synthetic polynucleotide
tacgagcagcatctcaggctcggcagcgtggtcgaacggctacacaccgggatgtcgtagagcgactacccgagaacgcagaaaagccccctacgcgccgtgtaagggcacgcagagggctctctggtagtctctattcagctgtgggtgtgcgtccgtctccgtggacgctagaggggtttacggggcctcgtggacccgcacgtacggttgcagaggcttgtcacggtaggcgtggtatcgctcggcctcctcggcgc

SEQ ID NO: 1163 - DNA, 260 bp, Artificial Sequence
  Description of Artificial Sequence: Synthetic polynucleotide
agtccagcccagccacgtctccttcgagatggggctacttgtgctggcctgacacggtgaggggctaggtccgtgggtcgcattgggacaagcccgcagggctagggggacaaagcgagggccaagagtctagtcgcccgaagggcgtccttacggtcaggggagcccccgtcaggggccaatctccaggagccgttcctatgccaacgtacgatagatccatgcgcgtgataggccgactgagaatctcccgacaaacc

SEQ ID NO: 1164 - DNA, 260 bp, Artificial Sequence
  Description of Artificial Sequence: Synthetic polynucleotide
aagctgaacgccagaccgcccacggcaatcgtgcctgccgtagcgacgttgacggacgatagactcttcatgcaccgctcctatcggtgtatcgcctctggtctgttcgcgcaggccaggggctcattctctcagtgaagaatcccgagaatcgggagcccaagtcttatcattcttcactctctgttatgctggctgacatgcgagttcttgggagactcaggatcagccgagccacagaggaatctaccagcatcgag

SEQ ID NO: 1165 - DNA, 260 bp, Artificial Sequence
  Description of Artificial Sequence: Synthetic polynucleotide
gagaacgccagacctccgaccgccacggttccggccgtcgcgacacgcacgggggatagactcagcactgcaccagctcctatctggtgtaacgcccctggtctgttcacgcaggccaggggctcttttggttagtgaagaatcccgaaaaacgggagcccgagtttcaacattcttctctccttgctactgtctctgacatgcgagttcttggaagattgcgaatctcacgagccactgaggaatctaccagcatcgag

SEQ ID NO: 1166 - DNA, 260 bp, Artificial Sequence
  Description of Artificial Sequence: Synthetic polynucleotide
gagaacgccagacctccgaccgccacggttccggccgtcgcgacacgcacgggggatagactcagcactgcaccagctcctatctggtgtaacgcccctggtctgttcacgcaggccaggggctcttttggttagtgaagaatcccgaaaaacgggagcccgagtttcaacattcttctctccttgctactgtgtctgacatgcgagttcttggaagattgcgaatttcacgagccactgaggaatctaccagcatcgag

SEQ ID NO: 1167 - DNA, 260 bp, Artificial Sequence
  Description of Artificial Sequence: Synthetic polynucleotide
agtccagcccagccacgtctccttcgagatggggctacttgtgctggcctgacacggtgaggggctaggtccgtgggtcgcattgggacaagcccgcagggctagggggacaaagcgagggccaagagtctagccgcccgaagggcgtccttacggtcaggggagcccccgtcaggggccaatctccaggagccgttccgatgccaacgtacgatagatccatgcgcgtgataggccgactgagaatctcccggcaaacc

SEQ ID NO: 1168 - DNA, 260 bp, Artificial Sequence
  Description of Artificial Sequence: Synthetic polynucleotide
agaacgccagagcgccgaccgccacggttccggccgtcgcgacacgcacgggggatagaatcgacattgcacgagctcctatctcgtgtaccgcccctggtctgttcgcgcaggccaggggctcttttgacctagtgaataatcccgaaaatcgggagcccgagttttatcattcttcactccttggtaccatgtctgacatgcgagttcttggaagattgcgaatttcccgagccactgaggaatctaccagcatcgag

SEQ ID NO: 1169 - DNA, 260 bp, Artificial Sequence
  Description of Artificial Sequence: Synthetic polynucleotide
agtccagcccagccacgtctcaatcgagatggggctacttgtgctggcctgacacggtgaggggctaggtccgtgggtcgcattgggacaagcccgcagggctagggggacaaagcgagggccaagagtctagtcgcccgaagggcgtccttacggtcaggggagcccccgtcaggggccaatctccaggagccgttcctatgccaacgtacgatagatccatgcgcgtgataggccgactgagaatctcccgacaaacc

SEQ ID NO: 1170 - DNA, 260 bp, Artificial Sequence
  Description of Artificial Sequence: Synthetic polynucleotide
cgagaacgccagacctccgaccgccacggttccggccgtcgcgacacgcacgggggatagactcagcactgcaccagctcctatctggtgtaacgcccctggtctgttcacgcaggccaggggctctttcgttagtgaagaatcccgaaaaacgggagcccgagtttcaacattcttctctccttgctactgtctctgacatgcgagttcttggaagattgcgaatctcacgagccactgaagaatctaccagcatcgag

SEQ ID NO: 1171 - DNA, 260 bp, Artificial Sequence
  Description of Artificial Sequence: Synthetic polynucleotide
gtccagcccagccacgtctccttcgagatggggctacttgtgctggcacgacacggtgagtggctaggtccgtgggtcgcattgggacaaagcccgcagggctagggggacaaggcgagggccacaggtctagccgcccgtagggcgtccttacggtcaggggagcccccgtcaggggtcagtctccaggagccgcttcaatgccaacgtacgatagatccatgcgcgtgataggccgactaagaatctcccgtcagtcc

SEQ ID NO: 1172 - DNA, 260 bp, Artificial Sequence
  Description of Artificial Sequence: Synthetic polynucleotide
gagaacgccagacctccgaccgccacggttccggccgtcgcgacacgcacgggggatagactcagcactgcaccagctcctatctggtgtaacgcccctggtctgttcacgcaggccaggggctcttttggttagtgaagaatcccaaaaaacgggagcccgagtttcaacattcttctctccttgctactgtctctgacatgcgagttcttggaagattgcgaatctcacgagccactgaggaatctaccagcatcgag

SEQ ID NO: 1173 - DNA, 260 bp, Artificial Sequence
  Description of Artificial Sequence: Synthetic polynucleotide
ccgttgctgcaaaaatcggggatagaatcttcatgcacctggccctttcaggtgtaccgcccccttcctgttaccgcaggtagggggctctttttctgttgacggtcggttacgctaccacagttgtcaaagtctaaagatggggaactcaatattcatgctttgcgaaagcgctgttctcacggctacactcctctgacatgcgggttcttgggagaatacgactctccagaatgatggaggagtctaccagtgtggaa

SEQ ID NO: 1174 - DNA, 260 bp, Artificial Sequence
  Description of Artificial Sequence: Synthetic polynucleotide
ccgttgctgcaaaaatcggggatagaatcttcatgcacctggccctttcaggtgtaccgccctctgcctgttaccgcaggtagggggctctttttctgttgacggtcggttacgctaccacagttgtcaaagcctaaaaatggggaactcgatattcatgctttgcgaaagcgctgttctcacggctacactcctctgacatgcgggttcttgggagaatacgactctccagaatgatggaggagtctaccagtgtggaa

SEQ ID NO: 1175 - DNA, 260 bp, Artificial Sequence
  Description of Artificial Sequence: Synthetic polynucleotide
ccgttgctgcaaaaatcggggatagaatcttcatgcacctggccctttcaggtgtaccgccctctgcctgttaccgcaggtagggggctctttttctgttgacggtcggttacgctaccacagttgtcaaagcctaaagatggggaactcgatattcatgctttgcgaaagcgctgttctcacggctacactcctctgacatgcgggttcttgggagaatacgactctccagaatgatggaggagtctaccagtgtggaa

SEQ ID NO: 1176 - DNA, 260 bp, Artificial Sequence
  Description of Artificial Sequence: Synthetic polynucleotide
ccgttgctgcaaaaatcggggatagaatcttcatgcacctggccctttcaggtgtaccgccctctgcctgttaccgcaggtagggggctctttttctgttgacggtcggttacgttaccacagttgtcaaagcctaaagatggggaactcgatattcatgctttgcgaaagcgctgttctcacggctacactcctctgacatgcgggttcttgggagaatacgactctccagaatgatggaggagtctaccagtgtggaa

SEQ ID NO: 1177 - DNA, 260 bp, Artificial Sequence
  Description of Artificial Sequence: Synthetic polynucleotide
ccatgcctgcccggacgaaactccgttgttcgccgccaggtccgacagggccgtgaacgacagcgagaacgccaatcctccgaccagaatggtgcctgcggtcgctgctcctacgggactgaaaaccctcactgaactggcctttcgtcgtgtatcaagtgtgttgtgttccagcaccccagtagtctacacttgagactatggccaaacaactaagagccctggtgggagcacgtgtcagtgtagttcagggaccacag

SEQ ID NO: 1178 - DNA, 260 bp, Artificial Sequence
  Description of Artificial Sequence: Synthetic polynucleotide
tacgagcagcacctcaggctcggtagcgtggtcgaacggctacacaccgggatgtcgtagagcgactaccctgagaacgcagaaaagccccctacgggccgctagggctcgcagagggcttctccggtagtctctattcagttgtactgctgagtccgtcagcgtgggcgctagaggggtttacggggcctcgtggacccgcacgtacggctgcagaggcttgtcacggtaggcgtggtagcgctccgcctcctcggcgc

SEQ ID NO: 1179 - DNA, 260 bp, Artificial Sequence
  Description of Artificial Sequence: Synthetic polynucleotide
atcaaggtctggcatctggtcgccgagcacctcaaccccgacctgatccccgacgtgtaaacgcccctgtgcgtccacggcgacgccggaagggtctgaggagtgcgcctagcgccgccaagatgcgccggggatgctgcccataacggtcgcgtcacgatccatagcgacgaaaggctccttccgcgcgaggtatcatatttcgtccatgacgatctgacgatactttcgtcatttctctatccagcctctaggctctc

SEQ ID NO: 1180 - DNA, 260 bp, Artificial Sequence
  Description of Artificial Sequence: Synthetic polynucleotide
ttcgagatggggctacttgtgctggcacgacacggtgagtggctaggtccgtgggtcgcattgggacaaagcccgcagggctagggggacaaggcgagggccaagggtctagccgcccgtagggcgtccttacggtcaggggagcccccgtcaggggtcagtctccaggagccgttccaatgccaacgtacgatagatccatgcgcgtgataggccgactaagaatctcccgacagtccgaggagtctacgtcgatcgac

SEQ ID NO: 1181 - DNA, 260 bp, Artificial Sequence
  Description of Artificial Sequence: Synthetic polynucleotide
tacgagcagcatctcaggctcggcagcgtggtcgaacggctacacaccgggatgtcgtagagcggctacccgagaacgcagaaaagccccctacgcgccgtgtaagggcacgcagagggctctctggtagtctctattcagttgtgtggttgcgtccgtcagcgtggacgctagaggggtttacggggcctcgtggacccgcacgtacggctgcagaggcttgtcacggtaggcgtggtagcgctctttctcgtcggaga

SEQ ID NO: 1182 - DNA, 260 bp, Artificial Sequence
  Description of Artificial Sequence: Synthetic polynucleotide
tgttaccgcaggtagggggctttttctgttgtcggacggctacgctaccacagttcgcaaagcctcaaaatcgggaactcgatattcatgctttgtgaaagtgctgtcctcatgcggaactgtaacacgttctagtcgttacaacctcgcatcggtgtttcgatcttcagacgttgcggacctttgatactgtacctgacatgcgagttcttggaagaatacgactctcgcgggtcatggaggaatcgacatcggtcgag

SEQ ID NO: 1183 - DNA, 260 bp, Artificial Sequence
  Description of Artificial Sequence: Synthetic polynucleotide
tgttaccgcaggtagggggctttttctgttgtcggacggttacgctaccacagttcgcaaagcctcaaaatcgggaactcgatattcatgctttgtgaaagtgctgtcctcatgcggaactgtaacacgttctagttgttacaacctcacatcggtgtttcgatcttcagacgttgcggacctttgatactgtacctgacatgcgagttcttggaagaatacgactctcgcgggtcatggaagaatcgacatcggtcgag

SEQ ID NO: 1184 - DNA, 260 bp, Artificial Sequence
  Description of Artificial Sequence: Synthetic polynucleotide
tgttaccgcaggtagggggctttttctgttgtcggacggctacgctaccacagttcgcaaagcctcaaaatcgggaactcgatattcatgctttgtgaaagtgctgtcctcatgcggaactgtaacacgttctagtcgttacaacctcgcatcggtgtttcgatcttcagacgttgcggacctttgatactgtacctgacatgcgagttcttggaagaatacgactctcgcgggtcatggaggaatcgacatcagtcgag

SEQ ID NO: 1185 - DNA, 260 bp, Artificial Sequence
  Description of Artificial Sequence: Synthetic polynucleotide
tgttaccgcaggtagggggctttttctgttgtcggacggctacgctaccacagttcgcaaagcctcaaaatcgggaactcgatattcatgctttgtgaaagtgctgtcctcatggggaactgtaacacgttctagtcgttacaacctcgcatcggtgtttcgatcttcagacgttgcggacctttgatactgtacctgacatgcgagttcttggaagaatacgactctcgcgggtcatggaggaatcgacatcggtcgag

SEQ ID NO: 1186 - DNA, 260 bp, Artificial Sequence
  Description of Artificial Sequence: Synthetic polynucleotide
ccgggggcggggctaccagtgctggcctgacacgataggggcttggctcgtgggtcgcatggcgggaaaagcccgcagggctaggggggaccaagcgggccaaagggctagccgcccgtagggcgtccttgcggtcaggggagccccccgcagggggtcagtttccagggagtgtccccgtgcaaacgtacgataggcccatgcgtgtgctgggtcgagtccgtctgtcgaggttcaacgaggagtccacctcggtagaa

SEQ ID NO: 1187 - DNA, 260 bp, Artificial Sequence
  Description of Artificial Sequence: Synthetic polynucleotide
accgccacggttccggccgtcgcgacacgcacgggggatagactcagcactgcaccagctcctatctggtgtaacgcccctggtctgttcacgcaggccaggggctcttttcattagtgaagaatcccgaaaaacgggagcccgagtttcaacattcttctctccttgctactgtctctgacatgcgagttcttggaagattgcgaatctcacgagccactgaggaatctaccagcatcgagcggcagcgcgagatcgtg

SEQ ID NO: 1188 - DNA, 260 bp, Artificial Sequence
  Description of Artificial Sequence: Synthetic polynucleotide
accgccacggttccggccgtcgcgacacgcacgggggatagactcagcactgcaccagctcctatctggtgtaacgcccctggtctgttcacgcaggccaggggctcttttcggtagtgaagaatcccgaaaaacgggagcccgagtttcaacattcttctctccttgctactgtctctgacatgcgagttcttggaagattgcgaatctcacgagccactgaggaatctaccagcatcgagcggcagcgcgagatcgtg

SEQ ID NO: 1189 - DNA, 260 bp, Artificial Sequence
  Description of Artificial Sequence: Synthetic polynucleotide
accgccacggttccggctgtcgcgacacgcacgggggatagaatcgacattgcacgagctcctatctcgtgtatcgcccctggtctgttcgcgcaggccaggggctctttgacctagtgaagaatcccaaaaatcgggagcccgagtttcaacattcttctctccttgctactgtgtctgacatgcgagttcttggaagattgcgaatttcacgagccactgaggaatctaccagcatcgagcggcagcgcgagatcgtg

SEQ ID NO: 1190 - DNA, 260 bp, Artificial Sequence
  Description of Artificial Sequence: Synthetic polynucleotide
aatcgagatggggctacttgtgctggcctgacacggtgaggggctaggtccgtgggtcgcattgggacaagcccgcagggctagggggacaaagcgagggccacaggtctagccgcccgtagggcgtccttacggtcaggggagcccccgtcaggggtcagtctccaggagcggtagaagtgccaaagtacgatggacgtatgcgtgtgctcggtcgggttcgtctctctcggttccaagaagaatctacgtcggtcgaa

SEQ ID NO: 1191 - DNA, 260 bp, Artificial Sequence
  Description of Artificial Sequence: Synthetic polynucleotide
tctacttttgaaaagataacaattgataatggagaaataataaagataatatttaggtaaaatgcgacaaaaaaggcattttttaacattttttaatataatatgatataataattatgaagttattggtggtaatggcggtatcggtagtacaacatattattaaataggaggtaaaaatgaataaagatgctgaatcatctcaaaaaaacaagcaaggtgatttaaatataaagcaaaaaatgtctgaaataaatgat

SEQ ID NO: 1192 - DNA, 88 bp, Artificial Sequence
  Description of Artificial Sequence: Synthetic oligonucleotide
acaagaatagaagtaagtcaagatggtgtgataaacatcgtatatagatttgaagaataatatttttatccttattgacatatgagga

SEQ ID NO: 1193 - DNA, 260 bp, Artificial Sequence
  Description of Artificial Sequence: Synthetic polynucleotide
ataagttaaccgtaaaatattcctgaggtgatgcgaatgatagtgattaaattacttgtaactgaagaagacttagacttattaaaagattttggatttattttctgggatgaacgaaaacttactcaagaagaactttataattattataagtttttactttcattacagaaggtttctaaggagggaagcgaagaatcatgaaaaaagctgctgcttatgcgagagtttcgacaaaggatcaatcaaaaatttcaatt

SEQ ID NO: 1194 - DNA, 260 bp, Artificial Sequence
  Description of Artificial Sequence: Synthetic polynucleotide
gcatcgtgttggggttgctacaaaccacccctgttgaagttcgagtaaccaatggccctcgggcggtcccatcacgggatcgcctgggggcctttttctttgaccaacatatgcacgtattcgcatacatgctttgttgaagcccgaacttgtagcacccgatgttcggacaatgtaaaacctgtgataccgtacctgacatgcgtgttcttgggagaatccgactgtccaggctcagcgacgaatctaccagtccggag

SEQ ID NO: 1195 - DNA, 260 bp, Artificial Sequence
  Description of Artificial Sequence: Synthetic polynucleotide
tcttcgtggcgatcaacaacagcgggaagacccaaacggtctaccgctgaccccgacctccgggctggccttcgggctggcccgggggtcttttttttgtgcctgacacatgcacgtattcgcatacgttgattgtagaatccccgaacttcgatcagtccatgttcggggtttgtgcaacctctgctatcgtctctgacatgcgtgttcttgggagaatcaggctgtccaggctcagcgacgaatctaccagtcccgag

SEQ ID NO: 1196 - DNA, 260 bp, Artificial Sequence
  Description of Artificial Sequence: Synthetic polynucleotide
gagccggtaagtagtgagtacggttccaaaaagaagggcgggagaaatcccgcccgatagtccaaacaatcaaggaacctcgtaaatgaaagacgtgaataacacaataggcaatcgtgcagccaatgtttgggagcgcccattgactggccccgaactgactgccaaccgcacccagcaggatattgatacatggtgggcgctgattgaccggcttttgcctgtggtgactgtcaacaaatggagcaagatcgaaaccg

SEQ ID NO: 1197 - DNA, 260 bp, Artificial Sequence
  Description of Artificial Sequence: Synthetic polynucleotide
acccgtcccctcgggctggccttcgggctggcccggggggtctttttttgtgcctgactcatgcacatattcgcatatgtcttcgtatcgaacgccgtcgtcaatctgacgctgccgttccttgtccatgccgccacgctacgcgggagtggttgaaggtccgcaagatgcgacgattcgcacctgttacagttaccaccatgcgtgtgctgggaagagtgaggttgtcgcggttttctgacgagtctacgtctgtcgag

SEQ ID NO: 1198 - DNA, 260 bp, Artificial Sequence
  Description of Artificial Sequence: Synthetic polynucleotide
tacgagtgccggtgcggtggattccacctgtctgacgctcgccgtgtcgtcgctctcggcggctagaagagggaccaggccgggtgcactcgagggggtgcatccggccaccccttttttgtctcaaattacatagtttccctacctaacatgtttgggtgccctttatctacctgcatcaatgcagtaagatggcacccatgacagcaacccttgagaccccaccacaggtcgtcgcgccgccccggctgagggctgcg

SEQ ID NO: 1199 - DNA, 260 bp, Artificial Sequence
  Description of Artificial Sequence: Synthetic polynucleotide
tacgagtgccggtgcggtggattccacctgtctgacgctcgccgtgtcgtcgctctcggcggctagaagagggaccaggccgggtgcactcgagggggtgcatccggccaccccttttttgtctcaaattacatagttttcctacctaacatgtttgggtgccctttatctacctgcatcaatgcagtaagatggcacccatgacagcaacccttgagaccccaccacaggtcgtcgcgccgccccggctgagggctgcg

SEQ ID NO: 1200 - DNA, 260 bp, Artificial Sequence
  Description of Artificial Sequence: Synthetic polynucleotide
aaaaattcaaggaacttcttgatttgggtgctattactcaagaagaatttgaaattcaaaagtcgaaattattaaaataaataaaaaaatccgctcaagtttggcaacgaggggcggattaaaatctatgtggtatagtaaacctccaaatttggagagttttactgtacttattttatcagaaatgaggtacaaaaacaatgactaagaaagtagcaatctatacacgagtatccactactaaccaagcagaggaaggg

SEQ ID NO: 1201 - DNA, 260 bp, Artificial Sequence
  Description of Artificial Sequence: Synthetic polynucleotide
tgcctcaatggttaaacttgttggtttagctgtttgctgaatcatctattttacctctttatattctacttttaacgcgggattcatgagacaacgactttaaacctatataagcactctatttaatttttgtctatcagtttgtatacagttatgtataatactatgggcaaaaataaactaatcaggctgcgttatctatggttactggattaacagattatagtgactgcgtgggttattgtcgggtttctactcaa

SEQ ID NO: 1202 - DNA, 260 bp, Artificial Sequence
  Description of Artificial Sequence: Synthetic polynucleotide
aagaaaatcacacttagtaaggataagtatatcgacatcgaatatacattttctttatagttttaaagttggttattagttactgtgatatttatcacggtacccaataaccaatgaatatttgataaattgaacatttttagtaaacaatattttctcaatatgagaattgcgctttacagaacacatgctctcattaatgtgataaaatattctgtaaatataatggaaaaagtgttgcttattgaaatgaagggggt

SEQ ID NO: 1203 - DNA, 260 bp, Artificial Sequence
  Description of Artificial Sequence: Synthetic polynucleotide
ggtgcggggtgtggcacgtgtctgatgctcgccgggtccgcgttctagggaaagtgagctaaccagaccgggaggtcgagtgcagtcgagggggctgcgctcgacctcccttttttatttgtctcaaattacttagtttgtctatctatgttgtttcggtgcccttcaaaaacaccgttcaacctggtaagatggcacctatgacagcgaccctcgagcgacacctcgacaccccgcagcaggaggccctgcgggtgggt

SEQ ID NO: 1204 - DNA, 260 bp, Artificial Sequence
  Description of Artificial Sequence: Synthetic polynucleotide
gctggccgatggagggcttcgggaccaccgagtgtcaactcgaggccctgaggatgatgggtcagtaaaagagagggggtcgggtgcagtcgaggggctgcatccggcccttttttatttgccaaaaattagttagttcggcttcctatattgtttcggtgcccttcaaatacaagctccaacctgctaagatggcacctatgacagcaaccctcgagcgacacctcgacaccccgcagcaggaggccctgcgggtgggt

SEQ ID NO: 1205 - DNA, 260 bp, Artificial Sequence
  Description of Artificial Sequence: Synthetic polynucleotide
gctggccgatggagggcttcggtaccaccgagtgtcaactcgaggccctgaggatgatgggtcagtaaagagagggggtcgggtgcagtcgaggggctgcatccggccccttttttatttgccaaaatttagttagttcggcttcctatattgtttcggtgcccttcaaatacaagctccaacctgctaagatggcacctatgacagcaaccctcgagcgacacctcgacaccccgcagcaggaggccctgcgggtgggt

SEQ ID NO: 1206 - DNA, 260 bp, Artificial Sequence
  Description of Artificial Sequence: Synthetic polynucleotide
atgaaaatatattaaaatattcctgaggtgatgcaaatgatagtaattaaattacttgtaactgaagaagacttagacttattaaaagattttggatttattttctgggatgaacgaaaacttacacaagaagaactttataattattataagtttttgctttcattgcagaaggtttctaaggagggaagcgaagaatcatgaaaaaagctactgcttatgcaagagtttcgactaccgaacaatcaaaaacaagtatc

SEQ ID NO: 1207 - DNA, 260 bp, Artificial Sequence
  Description of Artificial Sequence: Synthetic polynucleotide
cgagacggtaagaagggcggccccttcgatcccgcccgagtagagccagtcttcgcgtaaacgcaacaaggcccctccccccgaggcgtcagcatcgctgatgccgactagggagaggggctcaatcatgtcttacttcagcttcatcaactcaaggatctcgtccgcagtttcctcatcaagttcaggagcctcggagagccacttctcaagccactcctcttggctcactcatcctccagctcagtcagaggacccca

SEQ ID NO: 1208 - DNA, 260 bp, Artificial Sequence
  Description of Artificial Sequence: Synthetic polynucleotide
aagaaaatcacacttagtaaagataagtatatcgatatcgaatatacattttctttatagttttaaagttggttattaggtactgtgacatttattacggtaaccaataaccaacgaatttctgagaagttgaacatttttagtaaacaatattttctcaatatgagaatcgtgctttgcagaacacatgctctcattaatgtgataaaatattctgtaaatataatggaaaaagtgttgcttattgaaatgaagggggt

SEQ ID NO: 1209 - DNA, 260 bp, Artificial Sequence
  Description of Artificial Sequence: Synthetic polynucleotide
aagcagcctacaacaaggtttaccataaaactacatttggtctatctgacgttttaaaattgtttaaataaaacaaaaaagcccacgctcaaattttggacgaggagagcgtgagctaaataattggtagtatagtaaaagcctgcttttagtagggctatttactatacccattttaacaagaaatgaggtataaatcaatgcaaacaaagaaagtagcaatctatgtccgtgtgtcatcattacaccaagctatcgaa

SEQ ID NO: 1210 - DNA, 260 bp, Artificial Sequence
  Description of Artificial Sequence: Synthetic polynucleotide
tttcttaacagttatcttagctcttgtcggtcttattacttagtttgtcccatatattacaaatttaatcaaaaaaataaaaaagtccatatgctcacttagtttggcgactcagagcataggactattagaatagtaataaacctgcattgtaggttcttttactattctcattttaacaaaaaatgaggagtaaaacaatgaataaagttgctatctatgtgcgcgtaagcacaacaatgcaagctgaagaagggtac

SEQ ID NO: 1211 - DNA, 260 bp, Artificial Sequence
  Description of Artificial Sequence: Synthetic polynucleotide
aagagaaatttaatgttatgacatctagagaagacggtataattgaattagatttagaatttgatgaagacaaataaaaaaagccccacgctcaaattttggccaaggagagcgtgaggcaaattctagtatagtaaaaacctgctttttgggaggggcttttaccatacccattttaacagaaaaatgaggtgaaaacaatgaataaagttgctatctatgtgcgtgtgagtacaactatgcaagcagaagaggggtac

SEQ ID NO: 1212 - DNA, 260 bp, Artificial Sequence
  Description of Artificial Sequence: Synthetic polynucleotide
cccataacgttaaagcggctgtatcttgcagtcgcttgtttttttgtaaaagaaaaaagcctcatactctccacgaccaaattttgagtataagacttaacttgttgaaataaaccaaaaccactaaattattcattagggtataggtctttttctataccctattttatcataaaacctacaaaatagggagaagaacaatgaataaagttgctatctatgtgcgtgtgagtaccactatgcaagcagaagaagggtac

SEQ ID NO: 1213 - DNA, 260 bp, Artificial Sequence
  Description of Artificial Sequence: Synthetic polynucleotide
gaaagcagcttataacaaggtttatcataagactacatttggtctatctgacattttaaaattgtttaaataaacaaaaaagcctcacgctctgagtcgccaaactagagagcatgaagcgaataagtatgtataagaaaacagccattaaatgggcctttttcttatacccattttaacaagaaatgaggtataaatcaatgcaaccaaagaaagtagcaatctatgtccgtgtgtcatcattacaccaagctatcgaa

SEQ ID NO: 1214 - DNA, 260 bp, Artificial Sequence
  Description of Artificial Sequence: Synthetic polynucleotide
actatggagaggatatgtggattgacgtttttcttaaacggattaactttgctataaagtatacaaaataaaaaagccttacgctccccagacggcaatcttggagcataaggctacactacaagaaatcaggcattaaaaagccctttttcttgtacctattttaccattttttaggaaattttgaaagaggtactactatgatgacaacaaataaagtggcaatctatgtcagagtatcgactactaaccaggctgag

SEQ ID NO: 1215 - DNA, 260 bp, Artificial Sequence
  Description of Artificial Sequence: Synthetic polynucleotide
aagcaaactacgcaattcaacacttgaatgattaacacatgcccttatgggcgtacataatagacaatgaagtctttaaaataagacaaataaaaaagcacaccatatccgaccaaagacataggtgtgcttgaattttcaaacgcatggagcgttctatttaattatatcagagcgcccctttttaaggaggcttttttatgaacaaaaaagtggcactatatgttcgcgtgtctactttagaacaagcggaaagtggc

SEQ ID NO: 1216 - DNA, 260 bp, Artificial Sequence
  Description of Artificial Sequence: Synthetic polynucleotide
acgaagacggcggaggatttacaaaatcagaagttaagtatgctatgaaacatttagaggacgaagattaaaaaaagctcacgctctcaaagtttggcgactcagagcgtgagcgaggaagtataagaaagtaagcattaaaaagctgtctttcttgtacctattttatcattttttaataaattttgaaagagggtacaatgatgaacacaatcaacaaggttgctatttacgtacgtgtatcaacaaacgtgcaggca

SEQ ID NO: 1217 - DNA, 60 bp, Artificial Sequence
  Description of Artificial Sequence: Synthetic oligonucleotide
gggcttataaacaaggttcaggtaacagctgaggacattgttatcaagtggaaaatataa

SEQ ID NO: 1218 - DNA, 153 bp, Artificial Sequence
  Description of Artificial Sequence: Synthetic polynucleotide
aggcttataaacaaggttaaggtgacagctgaggacattgttatcaattggaaaatataaataattttagtaacctacatttcaatcaaggatagtaaaactctcactcttttctatctcatacatccttaccgaatgcaacacgagatcacg

SEQ ID NO: 1219 - DNA, 76 bp, Artificial Sequence
  Description of Artificial Sequence: Synthetic oligonucleotide
aggcttataaacaaggttaaggtgacagctgaggacattgttatcaattggaaaatataaataattttagtaacct

SEQ ID NO: 1220 - DNA, 153 bp, Artificial Sequence
  Description of Artificial Sequence: Synthetic polynucleotide
gggcttataaacaaggttcaggtaacagctgaggacattgttatcaattggaaaatataaataattttagtaacctacatttcaatcaaggatagtaaaactctcactcttttctatctcatacatccttaccgaatgcaacacgagatcacg

SEQ ID NO: 1221 - DNA, 260 bp, Artificial Sequence
  Description of Artificial Sequence: Synthetic polynucleotide
cccggcccggggtttgacccgtcgagtgtgcggttcgtgtggggccgatctgcagattgacgctcggcatgcaccgatgcgcacgcgtcggcgggtgttttagggtgcccgcacggcggtgcgtcgaagtgtgcatcgcagcacaattgaatacatacaacagaatagagcccggcaaatgcgcacgatcagcgttgaagagtacgccgaacaggtcgccgcggcggcaccgccgttgacggacgcgcagcgtggacggc

SEQ ID NO: 1222 - DNA, 260 bp, Artificial Sequence
  Description of Artificial Sequence: Synthetic polynucleotide
cgcggtccggggttcgacccgtcgagtgtgcggttcgtgtggggccgatctgcagattgacgctcggcatgcaccgacgcgcacgcgtcggtgcgtgttttagggtgccgcacggcggtgcgtcgaagtgtgcaccgcagcacaattgaatacatacaacagaatagagcctgacaaatgcgcacgatcagcgttgaagagtacgccgaacaggtcgccgcggcggcaccgccattgacggacgcgcagcgtggacggct

SEQ ID NO: 1223 - DNA, 260 bp, Artificial Sequence
  Description of Artificial Sequence: Synthetic polynucleotide
cggctacgctaccacagttcgcaaagcctcaaaatcgggaactcgatattcatgctttgtgaaagtgctgtcttcatgcggaactgtaacacgttctagttgttacagcctcacatcggtgactcgatcttaagacgttgcgaacctctgatactgtacctgacatgcgagttcttggaagaatacgactctcgcgggtcatggaggagtcgacatcggtcgaacgacagcgagagatcatcgagacctgggcgcgtcag

SEQ ID NO: 1224 - DNA, 260 bp, Artificial Sequence
  Description of Artificial Sequence: Synthetic polynucleotide
agagtaaatgacctgaaagaaaaattgatcatcttacaagacagagtagatgataatatataacaaacaaaaaagccccacgctctcaaactttggcgagtctgagcgtgaggctatgagcaagaaaggattttcatggagataacctcgcatgatgtcttttcttgtacctattttatcaaaaaaggggtacaaattcaatgaaaacaatgaataaagtggctatatatgtcagagtatctactacctcacaggttgag

SEQ ID NO: 1225 - DNA, 260 bp, Artificial Sequence
  Description of Artificial Sequence: Synthetic polynucleotide
agagtaaatgacctgaaagaaaaattgatcatcttacaagacagagtagatgataatatataacaaacaaaaaagccccacgctctcaaactttggcgagtctgagcgtgaggctatgagcaagaaaggattttcatggagataacctcgcatgatgtcttttcttgtacctattttatcaaaaaaggggtacaaattcaatgaaaacaatgaataaagtggctatatatgtcagggtatcgacgacaaaccaggttgag

SEQ ID NO: 1226 - DNA, 260 bp, Artificial Sequence
  Description of Artificial Sequence: Synthetic polynucleotide
aagaaaatcacacttagtaagaataagtatatcgacatcgaatatacattttctttatagttttaaagttggttattagttaccgtgatatttatcacggtacccaataaccaatgaatatttgataaattgaacatttttagtaaacaatattttctcaatatgagaattgcgctttacagaacacatgctctcattaatgtgataaaatattctgtaaatataatggaaaaagtgttgcttattgaaatgaagggggt

SEQ ID NO: 1227 - DNA, 260 bp, Artificial Sequence
  Description of Artificial Sequence: Synthetic polynucleotide
cggctacgctaccacagttcgcaaagcctcaaaatcgggaactcgatattcatgctttgtgaaagtgctgtcctcatgcggaactgtaacacgttctagtcgttacaacctcgcatcggtgtttcgatcttcagacgttgcggacctttgatactgtacctgacatgcgagttcttggaagaatacgactctcgcgggtcatggaggaatcgacatcggtcgagaggcagcgagagatcatcgagacctgggcgcgtcag

SEQ ID NO: 1228 - DNA, 76 bp, Artificial Sequence
  Description of Artificial Sequence: Synthetic oligonucleotide
gggcttataaacaaggttcaggtaacagctgaggacattgttatcaattggaaaatataaataattttagtaacct

SEQ ID NO: 1229 - DNA, 260 bp, Artificial Sequence
  Description of Artificial Sequence: Synthetic polynucleotide
cgtggcccggggttcgacccgtcgagtgtgcggttcgtgtggggccgatctgcagattgacgctcggcatgcaccgacgcgcgcgcgtcggtgcgtgttttagggtgccgcacggcggtgcgtcgaagtgtgcaccgcagcacaattgaatacatacaacagaatagagccaggcaaatgcgcacgatcagcgttgaagagtacgccgaacaggtcgtcgcggcggcaccgccgttgacggacgcgcagcgcggacggtt

SEQ ID NO: 1230 - DNA, 260 bp, Artificial Sequence
  Description of Artificial Sequence: Synthetic polynucleotide
tacacatcaaaacagatgatggaaactcacttgtttcacaaaagatgagcggtgagatgagagtgaaagttaaataaaacaaaaaagccccacgctcaaattttggtcgatgagagcgtgaggcgaatctagtacaagaaaaaagcattaaatggcttgttttcttgtacctattttatcaaaaaaggggtacaaaaacaatgattacaacaaataaggtagctatctatgtcagagtatcgacgactaaccaagctgag

SEQ ID NO: 1231 - DNA, 260 bp, Artificial Sequence
  Description of Artificial Sequence: Synthetic polynucleotide
atggaaattcacttgcatctcaaaaaatgaacggcgagatggaagttaaataaaataaaaataaataaaaaatcctcatgttcaaagtttggcgacggtgaacacgaggaaaggaagtatacaagaaaatagccattaaacgggcaattttcttgtacctattttatcattttttaacgaattttgaaagagggtacaatatgaatgcaatcaataaagttgctatttacgtacgtgtatcaacaaacgtgcaggcagaa

SEQ ID NO: 1232 - DNA, 260 bp, Artificial Sequence
  Description of Artificial Sequence: Synthetic polynucleotide
gttgcaaattatgccaacgagattttagaagtaatcaagaaattctcataaaacaaaaaagccccacgctctcaaactttggcgagtctgagcgtgaggctagtacttacaagaaaaacttttcaaaagagattgccttttgagatgttttcttgtacccattttatcattttttaggaaattttgaaagaggtactactatgataacaacaaataaagtagctatatatgttagggtgtctaccacatctcaggcagaa

SEQ ID NO: 1233 - DNA, 260 bp, Artificial Sequence
  Description of Artificial Sequence: Synthetic polynucleotide
tacacatcaaaacagaggatggaaactcacttgtttcacaaaagatgagcggtgagatgagagtgaaagttaaataaaacaaaaaagccccacgctcaaattttggtcgatgagagcgtgaggcgaatctagtacaagaaaaaagcattaaatggcttgttttcttgtacctattttatcaaaaaaggggtacaaaaacaatgattacaacaaataaggtagctatctatgtcagagtatcgacgactaaccaagctgag

SEQ ID NO: 1234 - DNA, 260 bp, Artificial Sequence
  Description of Artificial Sequence: Synthetic polynucleotide
ttaaagcgagtgtataaatccggggatactattattctacaaagcgaaaacccggcgtacaagcctatcatcctgcataaagacgatatgaaaaatgtaaggatcataggcaaactgaaaaaagtagtcctaaatttctagcgctagaaatttagacgggcgggcgacggctcgcccatcttttttaggagggaacaggtatgcgaaccgcattgtatatccgcgtgagcacggaagaccaagcgcgggaggggtattcc

SEQ ID NO: 1235 - DNA, 260 bp, Artificial Sequence
  Description of Artificial Sequence: Synthetic polynucleotide
aagaaaatcacacttagtaaggataagtatatcgacatcgaatatacattttctttatagttttaaagttggttattagttactgtgacatttgttacggtaaccaataaccaacgcacatacaaatcgaagctccgggaaattggatgtttttaataaacaaaactttctcaacacgagaatcttggatgtagaacacatgctctgattaatatggtaaaatattctgtaaatataatgggagctatggcgcttatcga

SEQ ID NO: 1236 - DNA, 260 bp, Artificial Sequence
  Description of Artificial Sequence: Synthetic polynucleotide
gccttgataagcaaggttcgagttactagtgaaactatcgttattttatggaaattatagagcgttttagtgacattcatttcaatcaaggatactaaaattcttgattcgagcataaaaaagactcattaatgcttagccttttttgaaatggtataataaaacaaaaaggagaaatcgagatggatgtttgtaaacacacaatagagatttatgatgacaaaaccaaagatatagaaacattgctttttgccaaagtg

SEQ ID NO: 1237 - DNA, 260 bp, Artificial Sequence
  Description of Artificial Sequence: Synthetic polynucleotide
aaaagaaagattacttgaatatagagataaatttgaagatgacactataaaattaatagatattttatacaatagctaaaaaaagccccacgctccaaccgaccaaagcgaagcacgaggcaaatctagtatagtaaaaacctaatttgttaggtctttttactatacccattttaacatagaaatgaggtataaatcaaatggctaaagtagcaatttacacaagagtaagcacgactttgcaggcagacgaaggttat

SEQ ID NO: 1238 - DNA, 260 bp, Artificial Sequence
  Description of Artificial Sequence: Synthetic polynucleotide
aagataccatctaacaaagtactagaaagggcaaaaatacttgaaatagagtttaattaacttttttactgtctattatacaaacaggcagtactgttagaataatgggcacgaaatctcttctcatctgatttaactcccctcaaacgaggggatttttttatgcaaaaaaaattttaaaaagctattgactgatacgaattcgtatcatataataaaatcagaaagtgatacgaattcgtatcaaaagttataaaagg

SEQ ID NO: 1239 - DNA, 260 bp, Artificial Sequence
  Description of Artificial Sequence: Synthetic polynucleotide
taccgccctctgcctgttaccgcaggtagggggctctttttctgttgacggtcggttacgctaccacagttgtcaaagcctaaagatggggaactcgatattcatgctttgcgaaagcgctgttctcacggctacactcctctgacatgcgggttcttgggagaatacgactctccagaatgatggaggagtctaccagtgtggaacgccaacgtgagttcatcgagacgtgggcgcggcagaacgatcacgaaatcgtc

SEQ ID NO: 1240 - DNA, 260 bp, Artificial Sequence
  Description of Artificial Sequence: Synthetic polynucleotide
acgtgtttttcaaaccaagaaataataaataaatacaaaaaaggcccatgctctcctcgaccaaaatttgagcatggaacctaaaccaatttgaaaaataacctaccgactatttggaatgacacaaaatccaaacagggtataggcctttttcctataccctattttatcataaaacctacaaaatagggaggaaaataatgaataaagtggcaatatatgtccgagttagtacaaaaggacaagcagatgaaggatat

SEQ ID NO: 1241 - DNA, 260 bp, Artificial Sequence
  Description of Artificial Sequence: Synthetic polynucleotide
acttgctgaagaaagtggcattgtaaacaaatctatgaaagtaaaagtaaacaactaaaataaaaagcccctgctctcctcgaccaaaatttgagcatgggacttaaaccaatttgaaaagcaacctaaaacactaagggtataggtcttttttctataccctattttaccataaaacttacaaaatagggaggctaacgatgaataaagttgctatttatgtgcgcgtgagtacaaaaggacaagcagaagagggttat

SEQ ID NO: 1242 - DNA, 260 bp, Artificial Sequence
  Description of Artificial Sequence: Synthetic polynucleotide
atgaggatcaggtattgatattcagtcccgagtctacaatcactaagtttagggatgtagtaattccgtttgatacccaaaacgaattaaagatacatggcaaggtagtattatattcagttacattagattaaacgttaacgttaatatttaatcataggcgggccgatcacccgccttcttttataggagttgaagtaatgaaaacagctgtatacattcgggtatcgacagatgaacaagtaaacgaagggtattca

SEQ ID NO: 1243 - DNA, 260 bp, Artificial Sequence
  Description of Artificial Sequence: Synthetic polynucleotide
gaatcgctgaaagttcgagatttggatgcaatttcaattgatgatcttcaaaactttaaaatagaatatcgtggcgtggaattaaccgaagatgaaaaaaggcaagtaatcagattgttgcgctcagtccttgaactaaagaaagaataaagttctcaaacttatatattagtataagagtattaaaggagtcgatttcgatgagagtttgtaagtacagacgagtatcgactgacatgcaaagggaagaaggagtatca

SEQ ID NO: 1244 - DNA, 260 bp, Artificial Sequence
  Description of Artificial Sequence: Synthetic polynucleotide
ggaggttttacaaaatcagaagtcaactacgctattaaacatttagaagacgaagattaaaataaacaaaaaagcccacgctctcaaagtttggcgactcagaacgtgagctaggaagtatacaagaaaaagccattaaatgggcgtttttcttgtacccattttatcatttttcaacgataattgaaagaggtacaaatatgaacaaagtagctatctatgtacgtgtatcaactactaaccaagccgaggaaggctat

SEQ ID NO: 1245 - DNA, 260 bp, Artificial Sequence
  Description of Artificial Sequence: Synthetic polynucleotide
ggttattgtttcgtttggttctgcaattatcggcgcaattgttagttatgtcataattaaatattttaaatagaaaataaaaaaatccacatgctcaactttggtcggtgcgagcatgcggatgaattagaatagtaaagaacctgcgtttgtaggctgttttactattcccattttaacatgaaatgaggagtaaaacaatgaacaaagtagcaatttatgttagagtttccacaactaaccaagcagatgagggatat

SEQ ID NO: 1246 - DNA, 260 bp, Artificial Sequence
  Description of Artificial Sequence: Synthetic polynucleotide
tatgataatatccaactcgcagaaaacatgagaacaattggtgaggttgtggatatctatagagaaaattaaaaaagccccacgctcagaagtttggcgaccgagagcgtgaggcaagctacaagaaagatttttcaaaagatagtgtcttttgaactcttttcttgtacccattttatcagaaaagaggtacaaatacaatgaaaacaacgaataaagtggcaatctatgttagggtctccactacctcgcaagctgaa

SEQ ID NO: 1247 - DNA, 260 bp, Artificial Sequence
  Description of Artificial Sequence: Synthetic polynucleotide
cgatcaccagggggaccatccatgcgtgggccaccccgttgtcggccgccagctcactgagcgcagtgaaggacagtgagaatgccagggccccaacggcaatcgtgcctgacgtggcgatacggaccgcgttgatcttcatcatgtctacagaccctatacggcgacaactccttgtcaagttgttgtagactcgtgtcgtggcaggtcaacgagttctggggcgtattcgcctctcgcgtctcaccgaagagtcgacc

SEQ ID NO: 1248 - DNA, 260 bp, Artificial Sequence
  Description of Artificial Sequence: Synthetic polynucleotide
gacccgtctctcatcgagatccgtaggcgcttcccagaagaggccccgaatggcctctagctcgcgggggccgagggtgccgaactcgctgacaaccttctcggcgtattcatcgagagatattgccatgtgtgaaagtttgccaggttccggtggtaacgtgtggcaaaccctgtagcatggctaagcatttgggcataagaaaaggggcacagccgatttggctggccccttctcttttgggtgggtggctaccggtt

SEQ ID NO: 1249 - DNA, 260 bp, Artificial Sequence
  Description of Artificial Sequence: Synthetic polynucleotide
ttgtctctcaaaagatgaacggagagatgaaagtcaaagtaaaataagaacaaaacaaaaaagccccacgctctctaagtttggcgactcagagcgtgaggctagtgacaagaaaaactttttcagaagatagtatcttttgagaggttttcttgtaccaattttatcatttttttggaaattttgaaagaggtactaccatgatgaacagaaataaagttgctatctatgtacgtgttagcacacaggggcaagttgat

SEQ ID NO: 1250 - DNA, 260 bp, Artificial Sequence
  Description of Artificial Sequence: Synthetic polynucleotide
tggaataaaaaagaacagctttattggggcactgcttccattgtatttttagtgctttttataatctaaacacaataataaaaagcctcacgctcaactttggtcgatgcgagcgtgaggcgaacgtgtatagtaaaaacctgctttgcagtaggtctctttactatacccattttaacataaaaatgaggtgaaaaacaatgattacaacaagaaaagtcgctatttatgttagagtcagtacaacaaatcaggcagag

SEQ ID NO: 1251 - DNA, 260 bp, Artificial Sequence
  Description of Artificial Sequence: Synthetic polynucleotide
atgtcctccatgactgctgatgaccacgtcaccatcgagtggcgggacgtgagcgagtagcggatacgacgaagccccggctaccccctttcgggggtgccggggccttgtctcagttgtggtggccgcactccatccgctcgatgacggcgagggcgtcctcgtacctgcttgcctcctgcatcaggaggaggcgaaggtcggcgagcttggcctgtacccacttggggagtcgggcctccctctccgagctcatcagc

SEQ ID NO: 1252 - DNA, 260 bp, Artificial Sequence
  Description of Artificial Sequence: Synthetic polynucleotide
ggcgtgcaggaggtgttccacccgggctgatcagatgatccatcgggaacctactcgtttgaggagttccatgcaggtgccctcgggcccgcctccgggcgggctcgggggtgcttttttttgtgcctgacatatgcacatattcgcatatgtcttcgtatcggaccccgtgtcaaatgcggcgactatgacaactcacggtgtaccctttcgacatgcgagtcctaggccgaatccggctctcccgaatcaccgaagaa

SEQ ID NO: 1253 - DNA, 260 bp, Artificial Sequence
  Description of Artificial Sequence: Synthetic polynucleotide
ctgacctccatgtctgtcgatgatcacgtcaccatcgagtggcgggacgtgagcgagtaaccgctacccccgaacgggggtaggtacgacgaagccccggctacccccattcgggggtgccggggccttgcgttgcacgtcagttgtggtggccgctctccaggcggtcgatctcttcgagagacgcctcgtagttgccggcctcctggaggaggagcaggcggaggtcggcgaacttggcctgcgcccaggcggggagc

SEQ ID NO: 1254 - DNA, 260 bp, Artificial Sequence
  Description of Artificial Sequence: Synthetic polynucleotide
ctgaccagcatgaccacggacgaccacgtcagcatcgaatggcgtgacgtcgaggagtaagcaggtacgacagagccccggctaccccctttcgggggtgccggggccttgtcttgtctcactccccccgaacgggggtggtgtcagttgtggtggccgctctccatctgctcgatgacttcgagggcgtcctcgtacttgctcgcctcctgcatcaggaggaggcggaggtcggcgagcttggcctgtgcccacttcgg

SEQ ID NO: 1255 - DNA, 260 bp, Artificial Sequence
  Description of Artificial Sequence: Synthetic polynucleotide
aggcaaatacctttgcggttgagctccttcttcccgattgggtagtaagccaatataaaaatactgaattcacccttgatgatatagctgtcatgaatggggttcctgcagagttagcccacctaaaagacctatcagagctaaaaaatttttagcccgaaaacagaacatatgtttccaaaaagggaggatagattatcatgaacttgatggatgaaaacactccaaagaatgtcgggatatacgttagggtttcaaca

SEQ ID NO: 1256 - DNA, 260 bp, Artificial Sequence
  Description of Artificial Sequence: Synthetic polynucleotide
cgtaaatggttatgatgcaactttaaaaagagtatttaaacatcaggatggtgtaactctagaacctcttagttacaatcctgaccaccaaacacaattttatagtgataaagacatggaccattaccctgtatcaattaaaggtaaattagtctggtatatggcaccacttaatattaaattctaggaggattttacctatgaagtgtgtagcctatattagggtatctacagatgaacaagctaaacatggttattcc

SEQ ID NO: 1257 - DNA, 260 bp, Artificial Sequence
  Description of Artificial Sequence: Synthetic polynucleotide
atgacctccatgtctgtcgatgatcacgtcacgatcgagtggcgggacgtcgaggagtagcaggtacgacgaagccccggctacccccattcgggggtgccggggccttgtcttgtctcgctacccccgaacgggggtggtgtcagttgtggtggccgctctccaggcggtcgatctcgttcagggcgtcctcgcaccggccggcctcctgcatcaggaggaggcggaggtcggcgagcttggcccgtgcccacttcggg

SEQ ID NO: 1258 - DNA, 260 bp, Artificial Sequence
  Description of Artificial Sequence: Synthetic polynucleotide
ctgaccagcatgaccgtggacgaccacgtcacgatcgaatggcgtgacgtcgaggagtaagcgggtacgacgaagccccggctacccccattcgggggtgccggggccttgtcttgtcttgctacccccgaacgggggtggtgtcagttgtggtggccgctctccaggcgctcgacctgcttcagtgcgtcctcgtaccgggccgcctcctgcatcaggagcaggcggaagtcgccgagcttgtcctgtgcccaccgagg

SEQ ID NO: 1259 - DNA, 260 bp, Artificial Sequence
  Description of Artificial Sequence: Synthetic polynucleotide
ctgacctccatgtctgtcgatgatcacgtcacgatcgagtggcgggacgtgagcgagtaaccgctacccccgaacgggggtaggtacgacgaagccccggctacccccattcgggggtaccggggccttgcgttgcacgtcagttgtggtggccgctctccaggcggtcgatctcttcgagagacgcctcgtagttgccggcctcctggaggaggagcaggcggaggtcggcgaacttgatctgggcccagacggggagc

SEQ ID NO: 1260 - DNA, 260 bp, Artificial Sequence
  Description of Artificial Sequence: Synthetic polynucleotide
ctgacctccatgactgtcgatgatcacgtcacgatcgagtggcgggacgtgagcgagtaacgggtacgacgaagccccggctacccccattcgggggtgccggggctttcgcttgtcagttgtggtggccgctctccattcgctcgatgatgccgagggcgtcctcgtacctgcctgcctcctgcatcaggaggaggcggaggtcggcgagcttggctcgcgcccacttcgggaggaccgtctctcgctcggagctcatg

SEQ ID NO: 1261 - DNA, 260 bp, Artificial Sequence
  Description of Artificial Sequence: Synthetic polynucleotide
accataagcactgctagcggtggtagttctggttttggtggtggtgaccgtatccaagcgactatggtatttgagaaaatttaaaaaagccccacgctcagaagtttgcagacagagagcgtgaggctagtggtaagaaaaaaagcattaaaaagctctttttcttatacccattttatcaagaaatgaggtaaaaatcaatgcgaaataaagtagcaatctacgtcagggtttcaaccgcttcacaagctgatgaaggt

SEQ ID NO: 1262 - DNA, 260 bp, Artificial Sequence
  Description of Artificial Sequence: Synthetic polynucleotide
cactggaacgacgaccgcgtcgagctcgtcgactacatggccgggcagctcgacgactagctcctcccccgtaccccctcctgggacgccggggatgccgctgcctacgtcgcaccccctagctatccatagaagaagaccgcctccgcccgtctagcgccggtgaggtgaccataacgaaacaacaacgaacgtcttacgggtgacgtagaatcgagacaacttcgctcacgagtgacgatatgacggttattccgtca

SEQ ID NO: 1263 - DNA, 260 bp, Artificial Sequence
  Description of Artificial Sequence: Synthetic polynucleotide
gcccgcaaggtggtgacccccgaggctgagcgagtagtcctggccgaccgagccgcctgacaacgcaagaagcccccgtcctcgaaggttgaggcgggggcttctgtcatgcagcgatcttgacggggccgagcagcgtcttcacggctcggagctggtcgtcggtcagaggtaacggcggcgagagcttgcggcgctcagccacgatggctcgggcctcctcgcgggtcacggggcgacccgtccgttcgcctggaacg

SEQ ID NO: 1264 - DNA, 260 bp, Artificial Sequence
  Description of Artificial Sequence: Synthetic polynucleotide
ctgtcgagcatgaccgtggacgaccacgtcaccatcgagtggcgagacgtggccgagtgacgaccacccccgaatgggggtaggtacgacaaagccccggctacccccattcgggggtaccggggccttcgtgtgtcagttgtggtggccgctctccaggcggtcaatctcttcgaggctcgcctcgtagttgccggcctcctggaggaggagcaggcgaagatcggcgagcttgacctgcgcccacacggggagtttct

SEQ ID NO: 1265 - DNA, 260 bp, Artificial Sequence
  Description of Artificial Sequence: Synthetic polynucleotide
cgagcgccccagcgcgggaagtggaaccccgagcgcgtctcggtagccttccacggctgactcctgaaaatcaccctccctcggctcggcgccggaggcggctcgccccgcgtcgacgccggaggaggagcgtgtaaacgccctcagtgactccatgagtggtgaagtgacggatctttcgtcactctcgtttgttttctaaggaagaagaactctagagagagtaatagagagtgacggttctttcgtcactttcgtca

SEQ ID NO: 1266 - DNA, 260 bp, Artificial Sequence
  Description of Artificial Sequence: Synthetic polynucleotide
cgcgcgccccagcgcgggaagtggtcgccggagcgcgtccgcgtcgccttccacggctgacggagcgccggaggagcgccggaggcgccgtgtaaacgccctccaagtgagcgaatagtgaagaaagtgagctaagttccttcccttgtattccattgcataggagagactctcttacagctagaacacaagggaaggaacttgcttcacttccttcactaaaactcactttcgcccttcgtgagcaacctcccccaccg

SEQ ID NO: 1267 - DNA, 260 bp, Artificial Sequence
  Description of Artificial Sequence: Synthetic polynucleotide
gtaaaggaatagagtatattttctactctaatggattaacagtcccagaaaatacaataaatataaaaaaagcaaattaaaaaagacctacacagcgccggcaagcaaacgtgtaggtcaagttggcaatagtaaaaaccttacttttcgtaggtctttttactattgccattttaacataaaagcgaggtataaatcaaatggcaaaagtagctatatacgctagagtatcaacgttaaaccaagcagatgaaggatac

SEQ ID NO: 1268 - DNA, 260 bp, Artificial Sequence
  Description of Artificial Sequence: Synthetic polynucleotide
gaggacaaggctagaatagcaatggttcttgagcagcacctcaagaataaaaagaaataaaaaagccctacgctctcaaagtttggcgactccgagcgtagagcgataatacaagaaagattttcaaaagatactatttttgaactcttttcttgtacctattttatcatttttttataaattttgaaagaggtactactatgattgcaacgaataaagtagctatttacgtgcgggtttcaaccatttctcaggcggaa

SEQ ID NO: 1269 - DNA, 260 bp, Artificial Sequence
  Description of Artificial Sequence: Synthetic polynucleotide
ggatggcggaggttttacaaaatcagaagccaactacgctattaaacatttagaagacgaagattaaaataaacaaaaaagcccacgctcaaattttggacgaggagagcgtgagctaataattggtagtatagtaaaaagcctacttttagtagggctctttactatacccattttaacaagaaatgaggtataaatcaatgcaaacaaaacgaaaagtagctatatacagtcgtgtttctacactacaccaagccgag

SEQ ID NO: 1270 - DNA, 260 bp, Artificial Sequence
  Description of Artificial Sequence: Synthetic polynucleotide
aggttttacaaaatcagaagccaactacgctattaaacatttagaagacgaagattaaaataaacaaaaaagcccacgctcaaattttggacgaggagagcgtgagctaatatgtatgtataagaaaaacaggcattaaaaagccctttttcttgtactcattttaacatttttttacaaaatttgaaagagggtacaatatgaacacaaaacgaaaagtagctatatatagtcgtgtttctacactacaccaagccgag

SEQ ID NO: 1271 - DNA, 260 bp, Artificial Sequence
  Description of Artificial Sequence: Synthetic polynucleotide
cgcagcaatcaaagcaattccaccttttcttatgtactttatcgagaacacttgtatatacagaatgaatgttctgaatttataactttaattatataataaatcattctcagaaaattgctagtactttcgacatattacgacaaaacttttataaaaaacatttagatttaatatatctttaattggagaggtttaaaatgaaagttgttctttacgtaagggttagtacgcaagaacaagttgaagaaggatatagc

SEQ ID NO: 1272 - DNA, 260 bp, Artificial Sequence
  Description of Artificial Sequence: Synthetic polynucleotide
cggtgggagctgggcgtcgaggtgtacccgctgcgcatggccccgcacgctgatgcgtaacacgcgctagcgtgtgcgccacaactgaatatcgacaactgaatatggggttccgctatgacagggcagcagctcgacgcgtgggttgcgcagcaggtggcgcgtttcaagccaggtgacttggacgccggcattgaggtgatgaagcgtgctgcgcgccggcaaggtggcaccgaagagaagcaacccgccgcgtagcg

SEQ ID NO: 1273 - DNA, 260 bp, Artificial Sequence
  Description of Artificial Sequence: Synthetic polynucleotide
ggaacagttatgggatttttaggagaaaaagggaagaagcaatggcactgcaacaagtgcagctgtatatttgagacaaaataaaaaagccccacgctcaaatttggcgaggagagcgtgaggcgaatctagtataagaaacaaccattaaataggtcgttttcttatacccattttaacaaaaaatgaggtgaaaaacaatgaggaaagtagctatttactctagagtatcaacaataaatcaagccgaagaaggatat

SEQ ID NO: 1274 - DNA, 260 bp, Artificial Sequence
  Description of Artificial Sequence: Synthetic polynucleotide
atacaacaaataggttgcattatcatgcttattcctatagtgtacattttgttccagcttatttcggcgtttaactaaaaaaaccccacgctctcaaagtttggcgactctgagcgtgaggcgaatctagtatagtaaaaacctgctttaagtaggtctctttactgtactcattttaacaaaaaatgaggtaaaaaacaatgagaaaagtagctatttactctagagtatcaacaataaatcaagccgaagaaggatat

SEQ ID NO: 1275 - DNA, 260 bp, Artificial Sequence
  Description of Artificial Sequence: Synthetic polynucleotide
ggaacagttatgggatttttaggagaaaaagggaaaaagcaatggcactgcaacaagtgcagctgtatatttgagacaaaataaaaaagccccacgctcaaatttggcgaggagagcgtgaggcgaatctagtataagaaacaagcattaaatggctcgttttcttgtacccattttaacaaaaaatgaggtgaaaaacaatgaggaaagtagctatttactctagagtatcaacaataaatcaagccgaagaaggatat

SEQ ID NO: 1276 - DNA, 260 bp, Artificial Sequence
  Description of Artificial Sequence: Synthetic polynucleotide
cagttatgggatttttaggagaaaaagggaagaagcaatggcactgtaacgagtgcagctgtatatttgagacaaaataaaaaaagccccccgctcaactttggtcggtgcgagcgtgaggcgaatctagtatagtaaaaacctgctttaagtaggtctctttactgtactcattttaacaaaaaatgaggtaaaaaacaatgagaaaagtagctatttactctagagtatcaacaataaatcaagccgaagaaggatat

SEQ ID NO: 1277 - DNA, 260 bp, Artificial Sequence
  Description of Artificial Sequence: Synthetic polynucleotide
gcgtcgagcatgaccgtggacgaccacgtcaccatcgagtggcgagacgtggccgagtagcagatacgacgaagccccggctacccccttctgagggtgccggggctttcgtgtgtcagttgtggtggccgctctccaggcggtcgatctcttcgagggacgcctcgtagttgccggcctcttggaggaggagcaggcggaggtcggcgagcttgacctgcgcccacacggggagcttcttctcgcgctcactgctgaag

SEQ ID NO: 1278 - DNA, 260 bp, Artificial Sequence
  Description of Artificial Sequence: Synthetic polynucleotide
cccgaggactgccaggtcgagtgggtggacgagcgtccgcgcctgtcggctgtgtcctgaacgcagagaagccccctacctgcgagaggtagggggctgtctcatgccgcgcgtcgggagggggctgcctcggcgatgccgaggagctgtcggaggtggacgacctgctcgtccgagagtgggggcggagggttctggcgtagctcctcgcgggctacctgccgaagctcctctcgggtcacggcgctacccgcccggcc

SEQ ID NO: 1279 - DNA, 260 bp, Artificial Sequence
  Description of Artificial Sequence: Synthetic polynucleotide
tcgaaggcgcgcaaggtcgtgaccccagagcatgagcgcgtggtcctggcagaccgctgacacaacgcaagaagccccctacctcggagtcgtgaggtagggggcttcgtcatgcagcgagacggacgggcttgcgtcggagctggaccggaccgagtagcaccttgacggtgcggagctggtcgtcggtcaggggtaacggtggggtgagctgtcgccgactggcgacgatggctcgggcctgctctcgggtcacgggg

SEQ ID NO: 1280 - DNA, 260 bp, Artificial Sequence
  Description of Artificial Sequence: Synthetic polynucleotide
tcgaaggcgcgcaaggtcgtgactccggagcatgagcgcgtgatcctggcagaccgctgacacaacgcaagaagccccctacctcggagtcgtgaggtagggggcttcgtcatgcagcgagacggacgggcttgcgtcggagctggaccggaccgagtagcaccttgacggtgcggagctggtcgccggtcaggggtaacggtggggtgagctgtcgccgactggcgacgatggctcgggcctgctctcgggtcacgggg

SEQ ID NO: 1281 - DNA, 260 bp, Artificial Sequence
  Description of Artificial Sequence: Synthetic polynucleotide
ggggagctggaggacatggccctggagctggagtccgtggtggcggacgcgatggagtgacacggcacacatgaaggagggtcggcccccgccaagggaccggccctcctttgcgttgcgtcacggccggctgagcggagagtgacggaacggggtcccagggggcggaaaaagtgccctgggacccttctttcttacgtacgtctttagagaagaacaggcccagggcacttttcttgccccctgtccctggcgggccc

SEQ ID NO: 1282 - DNA, 260 bp, Artificial Sequence
  Description of Artificial Sequence: Synthetic polynucleotide
gttgggaagggtcgccggaatgtgccgatcggtgagggcatcgggctgacgtggctgtgagtcagcggcgccgcgcgcgtacacgccgcaaccggttcacgaggaccggcgcgtgcgcgagtgcttcggggtcctcgagcaaattgttgacgcgttgccagaaccgtgtgacggagatgccgaattcagcgtggacggcgtcggcctggttgccggcgtagttccatcggtgggcggcgaagtcgagcaatgcgcgatcg

SEQ ID NO: 1283 - DNA, 260 bp, Artificial Sequence
  Description of Artificial Sequence: Synthetic polynucleotide
gggcgctggacgccggaccggatccaggcgcgggtcgccggacaagatctgcccgtgtagtgacgaagtgacgtatttacgtaccttctacattcttttctcgagagagagagttctcgagggaagaatgtagaaggtacgtatttcggtaacttgtgtcactcaggccgcccccggaactatttccgacggatcctgagcacctgccacggcctggccatcttcttagtcgtcaccccgtaccgacgattaggaggccc

SEQ ID NO: 1284 - DNA, 260 bp, Artificial Sequence
  Description of Artificial Sequence: Synthetic polynucleotide
gtatttgaaaaaatcaagtaaaataaaaaggccccacgctcaactttggtcggtgcgagcgtgaggcgaatctagtacaagaaatcaggcattaaaaagccctttttcttgtacccattttatcattttttaggaaataagaaaagaggtacagcatggctgaaaaaagaaaagtagccatatattgcagggtttcatccatgcaccaggcaatagaaggttattcaatcgaacaacaacgagacagtttgacaaaatac

SEQ ID NO: 1285 - DNA, 260 bp, Artificial Sequence
  Description of Artificial Sequence: Synthetic polynucleotide
gccaagggcatgagcttcgaggaccagatcgtcgtggaacctcggtacgtggccgcgtagctgcccggaacgcaagaagccccgtcctccagaaggaggcggggctgtcttgtgtcaggcgacgtgtcggcgaggcggttggagctctccgaacagggtccgcacgatgcgggcctgctctccggtcggcggaggcggcgggttgtcagcccagtgccgctcccaccttgcgatgcggtcggacagggtcacggtgccac

SEQ ID NO: 1286 - DNA, 260 bp, Artificial Sequence
  Description of Artificial Sequence: Synthetic polynucleotide
gataatgagaacggtaaggtaaatacgcttgatataagggagattacttttaaattttaatagtagtagtgttacagggtaggtagtgcttgtaacactatttttatgtataaaaaaagaccgcaccatttaaggtacggtttatgtataggttgagactacaccttactttaggcagctttagagacattatatgttcttctcttatccacgccgtcccccgacgtactacctacacccgattggtaatgccaatcact

SEQ ID NO: 1287 - DNA, 260 bp, Artificial Sequence
  Description of Artificial Sequence: Synthetic polynucleotide
cggtgggagcttggcgtcgaagcgtatccgctgcgcatggcctcacgcattgatgcgtaacgcgcgctaacgtgtgcgctcacaactgaatatcgacaactgaatatggggtaccgctatgacggggcagcagcttgacgcatgggttgcgcagcaggtggcgcgtttcaagccgggcgatttggacgccggcattgaggtgatgaagcgcgctgcgcggcgccgcatgggggatcaacggaagcggcccgccgcgtaac

SEQ ID NO: 1288 - DNA, 260 bp, Artificial Sequence
  Description of Artificial Sequence: Synthetic polynucleotide
cggtgggagctgggcgtcgaggtgtacccgctgcgcatggccccgcacgctgatgcgtaacacgcgctagcgtgtgcgccacaactgaatatcgacaactgaatatggggttccgctatgacagggcagcggctcgacgcgtgggttgcgcagcaggtggcgcgtttcaagccaggtgacttggacgccggcattgaggtgatgaagcgtgctgcgcgccggcaaggtggcaccgaagggaagcaacccgccgcgtagcg

SEQ ID NO: 1289 - DNA, 260 bp, Artificial Sequence
  Description of Artificial Sequence: Synthetic polynucleotide
cggtgggagctgggcgtcgaggtgtacccgctgcgcatggccccgcacacagatgcgtaacacgcgctagcgtgtgcgccacaactgaatatcgacaactgaatatggggttccgctatgacagggcagcagctcgacgcgtgggttgcgcagcaggtggcgcgtttcaagccaggtgacttggacgccggcattgaggtgatgaagcgtgctgcgcgccggcaaggtggcaccgaagagaagcaacccgccgcgtagcg

SEQ ID NO: 1290 - DNA, 260 bp, Artificial Sequence
  Description of Artificial Sequence: Synthetic polynucleotide
cggtgggagctgggcgtcgaggtgtacccgctgcgcatggccccgcacacagatgcgtaacacgcgctagcgtgtgcgccacaactgaatatcgacaactgaatatggggttccgctatgacatggcagcagctcgacgcgtgggttgcgcagcaggtggcgcgtttcaagccaggtgacttggacgccggcattgaggtgatgaagcgtgctgcgcgccggcaaggtggcaccgaagagaagcaacccgccgcgtagcg

SEQ ID NO: 1291 - DNA, 260 bp, Artificial Sequence
  Description of Artificial Sequence: Synthetic polynucleotide
cggtgggagctgggcgtcgaggtgtacccgctgcgcatggccccgcacgctgatgcgtaacacgcgctagcgtgtgcgccacaactgaatatcgacaactgaatatggggttccgctatgacagggcagcggctcgacgcgtgggttgcgcagcaggtggcgcgtttcaagccaggtgacttggacgccggcattgaggtgatgaagcgtgctgcgcgccggcaaggtggcaccgaagagaagcaacccgccgcgtagcg

SEQ ID NO: 1292 - DNA, 260 bp, Artificial Sequence
  Description of Artificial Sequence: Synthetic polynucleotide
cggtgggagcttggtgtcgaagtgtatccgctgcgcatggcctcacgtattgatgcgtaacgcgcgctaacgtgtgcgctcacaactgaatatcgacaactgaatatggggtaccgctgtgacgggacagcagcttgacgcatgggttgcgcaacaggtggcgcgtttcaagccgggcgatttggacgctggcattgaggtgatgaagcgcgctgcacggcgtcgcatggggggtcaacggaagcggcccgccgcgtaac

SEQ ID NO: 1293 - DNA, 260 bp, Artificial Sequence
  Description of Artificial Sequence: Synthetic polynucleotide
gtcgggaagggccgccggaacgtgcccatcggtgagggcatcgggctcacctggctgtgagtcagcggcgccgcgcgcgtacacgccgcagccggttcacaaggaccggcgcgtgcgcgagcgcttcggggtcgtcgagcaggttgttgacgcgctgccagaaccgggtgatcgagatcccgaactcggtgcggaccgcgtcggcctggttgccagcgtagttccagcggtgggcggcgaagtcgagtagcgcgcggtcg

SEQ ID NO: 1294 - DNA, 260 bp, Artificial Sequence
  Description of Artificial Sequence: Synthetic polynucleotide
aagttaaagaagatagtaaactacaattagtatacaaagcatcaatttggaacgataaaacagtacgctttaatttagactaaataaaaaaataagcactctctcaacttggcggaaggtagagtgcttacacaaaaaatcaacctataaaataggtctctttatattgcctattttatcatataaaggagaaaaatactatgaaattacgggctgcaatatatgtacgagtatcgacaatggaacaagctgaggaagga

SEQ ID NO: 1295 - DNA, 260 bp, Artificial Sequence
  Description of Artificial Sequence: Synthetic polynucleotide
cacgtgtagattcgttaaaatactttattataggctcagtagttacattgcttattggtattgcaggtatagtttacgcaaactggcaggtaattagttcaatgttgcaattggcaaataataaataacatatagccctatacaagggcttttctttagacaaataaatcgaacatatattctgtttagggggaatccgaatggcagtaggtatttacattcgtgtttcgacagaggaacaggcaaaagaagggtactcc

SEQ ID NO: 1296 - DNA, 260 bp, Artificial Sequence
  Description of Artificial Sequence: Synthetic polynucleotide
tgtccggatggtcatggcccgtgagcgcgtgaccgcgaaggccctcgccgccgcgactggaatctcccgaagctacatgggcaagcgactgcgggacgaagcacccttctccctgaacgacgttgaggccatcagcaaggtgctcggcatcgaactgccagagctctagtcctcccccacgaaatgaacggaaagaagtaatgcgcgcagtcctctacctgcggcagtccgtagcccgagaggactccatcagcctggag

SEQ ID NO: 1297 - DNA, 260 bp, Artificial Sequence
  Description of Artificial Sequence: Synthetic polynucleotide
ccgcagaagctgcaacgcgagcaagacaagccgccgatcgaagtcctttggcgcacatagcaaaagcccctgcctggcgtgaatgccggacgggggctttgcttttcgagctagacgacggctgagagcgtgatctcgtaggcgagcctgttcagcgcagtgaggtcgtccagcaggtccttcgggtcgtcggtctgtgctgcgctggcgagcaggcccgtgctgaggttcacgagctggcgaaagttgatcgcggtcga

SEQ ID NO: 1298 - DNA, 243 bp, Artificial Sequence
  Description of Artificial Sequence: Synthetic polynucleotide
gaaaaaagactatgcgatgaactaaatatcgaatatataaatttaaaccttcgcactggacctagctatatatttaccgaagaagaatatcaggagttgaaatccgactacgccaaattgtttttacagttagaaaatattgatgaaaacaactagtatttattttgaaaggagcaattttatatgaaacgtgcagcattgtatatacgtgtatccacaatggaacaagccaaggaaggatac

SEQ ID NO: 1299 - DNA, 260 bp, Artificial Sequence
  Description of Artificial Sequence: Synthetic polynucleotide
aaatcgactgttgatctttagccctgaatcaaccttcaaaaagtatcatgatattgttgttccatatgacacagttaatgatcttaaaatctatgctaaagtcatatggtatgccgtgttattagattgagtctttagcgctaaagatttaatcagggcgggcgacggctcgcccaattttttctaaggggggttgactaatgagagtggccatttacgtgagagttagcacagacgaacaagcaaaagaaggtttttct

SEQ ID NO: 1300 - DNA, 260 bp, Artificial Sequence
  Description of Artificial Sequence: Synthetic polynucleotide
aagaaatggaaaataatccggacaaaaaccaacatgctggaggtggtccaggaatgtcgttaacacaccctaatcaatcatatgatagttttagaaaagaagtaggaaaagcaagaagtgaagcaatagttgttcaacaataaaatttcgggtagctcgcctacccttattattttttgccaattttgaggagggaacacatgaaagtagcaatttacactagagtttcaagtgctgaacaggcaaatgaagggtattct

SEQ ID NO: 1301 - DNA, 260 bp, Artificial Sequence
  Description of Artificial Sequence: Synthetic polynucleotide
gtcgggaagggccgccgaaacgtccccatcggtgaaggtatcggcctcacctggctgtaactcagcggcgccgagaccgcagacgccgcaaccgattcaccaccactggtgcgtgcgcgagcgcgtcggggtcgtccagcaggttgttgacgcgctgccagaaccgggtgaccgtcatgccgaactcggtgcggaccgcctcagcctggttgccggcgtagttccagcggtgggcggcgaagtcgagcaacgcccggtcg

SEQ ID NO: 1302 - DNA, 260 bp, Artificial Sequence
  Description of Artificial Sequence: Synthetic polynucleotide
gttgggaagggccgccggaacgtcccgatcggtgagggcatcgggctcacctggctgtgagtcagcggcgccgcgcgcgtacacgccgcaaccggttcacgaggaccggtgcgtgcgcgagggcctcggggtcgtcgagcaggttgttgacgcgctgccagaaccgggtgaccgagatcccgaactcggcgtggaccgcgtcggcctggttgccggcgtagttccatcggtgggcggcgaagtcgagcaatccgcggtcg

SEQ ID NO: 1303 - DNA, 260 bp, Artificial Sequence
  Description of Artificial Sequence: Synthetic polynucleotide
cgcaagttcgacacgcagaccgtcgtgtttaggccgcgcaacccggcggtgcagatgtagcctgctgatgctcgaccacaactgaatacgacaactgaataggttcgacatgcaacaactcgccgatttcgaggcgcagtatggcgccgacatggacgccgccgcggcacaattccctccaatgaccgatgcgcagcgggcgcgggtcgccacggttctgcgcggcaactcgacccggcacgcggcggcagcctagagcg

SEQ ID NO: 1304 - DNA, 260 bp, Artificial Sequence
  Description of Artificial Sequence: Synthetic polynucleotide
gtcgggaagggccgccgaaacgtccccatcggtgaaggtatcggcctcacctggctgtgactcagtggcgccgcgaccgcagccgccgcaaccgattcacgaccaccggtgcgtgctcaagcgccgccgggtcgtcgagcaggttgttgacacgctgccagaaccgggtgaccgagatgccgaactcagcttggactgcgtcggcctggttgccggcgtagttccagcggtgggcggcgaagtcgagtagcgcgcggtcg

SEQ ID NO: 1305 - DNA, 260 bp, Artificial Sequence
  Description of Artificial Sequence: Synthetic polynucleotide
gttgggaagggccgccggaatgtgccgatcggtgagggcatcggcctcacctggctgtgagtcagcggcgccgagaccgcagccgccgcaaccgattcacgagcgtcggggcgtacgcaagcgcctccgggtcgtccagcagattgttgacgcgctgccagaaccgggtgaccgtcatgtcgaactcagtgcggaccgcctccgcctggttgccggcgtagttccaccggtgggcggcgaagtcgagcaacgcgcggtcg

SEQ ID NO: 1306 - DNA, 260 bp, Artificial Sequence
  Description of Artificial Sequence: Synthetic polynucleotide
agtatcaaaattgataaaaaagacggagttacagaagtattagatatagaattttattagtgtttatgttacatttacacatgtaaagttcacgtatatacaaaaaaatcgacaaaacaaaagagcacagcgtgtataagtagtgttggtagcactcttataccgtccacctgattgcgccaggtaaacacttgccatactctcatgagttattttacatcatgcagggtctattaagcaacgtttaccaaattattggt

SEQ ID NO: 1307 - DNA, 260 bp, Artificial Sequence
  Description of Artificial Sequence: Synthetic polynucleotide
gatatttagaccagattcatatgataatcgtttcttcgattacacagtttcttatgaagagtctattaatataaaaattcacggtaaagtagtaatttacatagttgcattagactaacaactagatgaattaaatatttagcgctaaatatttaatggacagccttgctagctgtcctctttttaaaaggaggattattatgaccgttggaatttatattcgtgtttctactgaagaacaagtccgagatggattttct

SEQ ID NO: 1308 - DNA, 260 bp, Artificial Sequence
  Description of Artificial Sequence: Synthetic polynucleotide
gtcgggaagggccgccggaacgtgccgatcggtgagggcatcggcctcacctggctgtagctcagcggcgccgagaccgcagacggcgcagccgattcacgagagtcggggcgtgcgcgagcgcttccgggtcgtccagcacgttgttgactcgctgccagaaccgggtgaccgagatcccgaactcgttgcggaccgcctcggcctgattgccggcgtagttccatcggtgcgcggcgaagtcgagcaacgcccggtca

SEQ ID NO: 1309 - DNA, 260 bp, Artificial Sequence
  Description of Artificial Sequence: Synthetic polynucleotide
gtcgggaagggccgccggaacgtgccgatcggtgagggcatcggcctcacctggctgtgattcagcggcgccgagaccgtagacgccgcaaccgattcaccagggtcggggcgtgcgcgagcgcgtcggggtcgtccagcaggttgttgacgcgctgccagaatcgggtaaccgagatcccgaactcgttgcggaccgcctcggcctggttgccggcgtagttccatcggtgggcggcgaagtcgagcagagcccggtcg

SEQ ID NO: 1310 - DNA, 260 bp, Artificial Sequence
  Description of Artificial Sequence: Synthetic polynucleotide
gtcgggaagggccggcggaacgtgcccatcggtgagggcatcggcctcacctggctgtaactcagcggcgccgagaccgcaggcgccgcaaccggttcacgagcatcggtgcgtgtgcgatcgcctccgggtcgtcgagcaggttgttgacgcgctgccagtaccgggtgaccgtcatgtcgaactcggtgcggaccgcttcggcctgattgccggcgtagttccagcggtgggcggcgaagtcgagcaacgcccggtcg

SEQ ID NO: 1311 - DNA, 260 bp, Artificial Sequence
  Description of Artificial Sequence: Synthetic polynucleotide
gtcggcaagggacggcggaacgtccccatcggtgagggcatcggactcacctggctgtgactcagcggcgccgagaccgcagccgacgcaaccggttcacgaccaccggggagtgctcgagcgccgccgggtcgtcgagcagattgttgacgcgctgccaaaaccgggtgacggagatcccgaactcggcgtggaccgcggcggcgtggttacccgcgaagtgccaccggtgcgcggcgaactcgagcaacgcccggtct

SEQ ID NO: 1312 - DNA, 260 bp, Artificial Sequence
  Description of Artificial Sequence: Synthetic polynucleotide
ataggacttgatggtgaaataaccgtttgtttactggaaggaactgaggtagatttataaagcaaacgtaagcattatgtgcaatcctaccatgaggacgaggaaataaccccggagcaggctcacaagaacgctgtcgagctggcagagcatacaaaggcatggaaagggcatgaagttctgatagccacgcatatagacaaggggcatatacacacgcactttattgtcaattccgtaaattatgagaacggtcataa

SEQ ID NO: 1313 - DNA, 260 bp, Artificial Sequence
  Description of Artificial Sequence: Synthetic polynucleotide
atttcagaagatgggcagataagtgtaaaattcttagaggggacagaggtagacttgtaagtgactgtgactgaaaggttgcagtttttttcgtttttagtggtataatagccgtataaatcataattgatggtgaattacatggaaaataatttgaatttcgatatttacgagcatcactttggagcattatattatcacataaaatctttgattggggaatcccctatctatgatgaaactattgatgaggaagattt

SEQ ID NO: 1314 - DNA, 260 bp, Artificial Sequence
  Description of Artificial Sequence: Synthetic polynucleotide
caggtgggtgtcggtcgtcgcgggttgatcggcgaaggcgtggaattcacctggctctagaccggatccgtcggagccggttcaccgcgaccgggttgtgcgcgagcgcttcctcggtgtcgagtatccggttgaccttctgccagaagcgggtgaccgagatcccgaactcggcgcggatcccgtcggcctggtttcccgcgtagttccaccgtcgggcggcgaagtcgagcaatgctcggtcatcgtcggtcacgcga

SEQ ID NO: 1315 - DNA, 260 bp, Artificial Sequence
  Description of Artificial Sequence: Synthetic polynucleotide
caggtggggatcggtcgtcgcgggttgatcggcgaaggcgtggaattcacctggctctagaccggagccgacgtagccggttcaccgcgaccggattgtgcgcgagcgcttcctctgtgtcgagtatccggttgaccttctgccagaagcgggtgaccgagatcccgaactcggcacggatcccgtcggcctggtttcccgcgtagttccaccgttgggcggcgaagtcgagcaatgctcggtcgtcgtcggtcacgcga

SEQ ID NO: 1316 - DNA, 260 bp, Artificial Sequence
  Description of Artificial Sequence: Synthetic polynucleotide
atctcagaagatgagcagataagcgtaaatttcttagaggggactgaggtagacttgtaagtgactgtgaccgaaaggttgcagtctttttgtaaatttagtggtataatattccttgaaggcgcttttcaataaaatttgagtgataacaagaaaactttgtgcagatgacttaccagaagaagtaatttcttgtaaggttctgtctagtcgacatggagaagaaaagaaagatgaatttaacaacagaaagattgacc

SEQ ID NO: 1317 - DNA, 260 bp, Artificial Sequence
  Description of Artificial Sequence: Synthetic polynucleotide
tgttcatcgtcataaatatcaaattcactactataattttcaactgattcttttatataagctatttctgcgtcagtaaattttacacacatttcatcacctactttttattttattatatcacatttagtacctagtactaaaatcacgggtagcccgcctacccttattattttttgccaattttgaggagggagcacatgaaagtagcaatttatactagagtgagtacacttgaacaaaaagaaaaaggacactct

SEQ ID NO: 1318 - DNA, 260 bp, Artificial Sequence
  Description of Artificial Sequence: Synthetic polynucleotide
tgaactacactctctttgatggtatattacatatatacaaaacaagccgctgaaatatttgcggcaagcttcaaattagacaagtcgctgaaatatttgcgacatgagagggtgcatctgcgctctctctttttttatacaattttcacgggtagcccgcctacccttattattttttgccaattttgaggagggagcacatgaaagtagcaatttatactagagtgagtacacttgaacaaaaagaaaaaggacactct

SEQ ID NO: 1319 - DNA, 260 bp, Artificial Sequence
  Description of Artificial Sequence: Synthetic polynucleotide
ctaccttctaaagtttcaatataggtagttctatctgctttttctgcattaactataactggtttttttctaacctttactttaggagacatattatcacctacttttttattttattatatcacatttaatactaaggactaaatcacgggtagcccgcctacccttattattttttgccaattttgaggagggagcacatgaaagtagcaatttataccagagtaagtacacttgaacaaaaagaaaaaggacactct

SEQ ID NO: 1320 - DNA, 260 bp, Artificial Sequence
  Description of Artificial Sequence: Synthetic polynucleotide
gaataaggtgttactataacaatatattagggaaatatccctaaacctttttgatattcgctattcttatttgaatagtaaacttgaaatcttataaatataagtggcacctattttatataggtgtctttttttatgtgataaattcttgggtaattcgtctacccttatattttttacttttttaaggaagtgagaacatgaatgtagcaatttattgtcgtgtcagtacactagagcaaaaagaacatggctattct

SEQ ID NO: 1321 - DNA, 260 bp, Artificial Sequence
  Description of Artificial Sequence: Synthetic polynucleotide
tacagtaaaacgtgtaagacgtactgaaacaaaattacatttagatccagtaagttattcagatgaatttaaaacaaatacttttgatttagaaagcttagaagaaatagaagtaatcggaaaagtaatttataactaccaaatatttgagtaagggtactacattttgtggcacccttttcttttaaaggagtgataacttgaacgtagcaatatattgtcgtgtcagcacattagagcaaaaagaacatggctattct

SEQ ID NO: 1322 - DNA, 260 bp, Artificial Sequence
  Description of Artificial Sequence: Synthetic polynucleotide
gcgctcgtacaccgtcaatcagttgtagaaaatggagacatggccttgatcgccgtaaataatgaaatattgatcagacgcgtttataaagataagaatgaaattacgcttgatgcattattgagaaaacaaactattgatgaaagagaaactttattctctgttatcggaaaagtaacaaaggttataggtgaatactaatgaagtgtgcaatatatagaagagtttctacagatgaacaagcggaaaaaggattctca

SEQ ID NO: 1323 - DNA, 260 bp, Artificial Sequence
  Description of Artificial Sequence: Synthetic polynucleotide
acattagttgataaagttataattgatggtaatcaaactcgtatttactggagattctaattttgttaatttgggagaaagaatattaatactttctcccaaaacaacaatcctcccggttcgtatttagataatcatactacattgtttatttcaagtaaaggcagtttagttttttattaaatataatagttacgttatctttggattatttacgcatattctaattcttaaaatagcaatttaaaggattacttaac

SEQ ID NO: 1324 - DNA, 260 bp, Artificial Sequence
  Description of Artificial Sequence: Synthetic polynucleotide
cgcccgcgcaagttcgacttcgcaccgggcaccgtgctgctgcgcgaatggggcgagcgcgagcatcgggtgacggtcaatgccgagggccatttcgagtacgagggccacaccttcaagagcttgacggcggtggctcggcacatcaccggccagcattggagcggcccgctgttcttcggtctgaaaggaggcgcctgatgacggaaatcgcctccactaaggcgcgcaaacgctgcgcggtctactgccgggtgtcg

SEQ ID NO: 1325 - DNA, 260 bp, Artificial Sequence
  Description of Artificial Sequence: Synthetic polynucleotide
aagaaatggaaaataatccggacaaaaaccaacatgctggaggtggtccaggaatgtcgttaacacaccctaatcaatcatatgatagttttagaaaagaagtaggaaaagcaagaagtgaagcaatagttgttcaacaataaaatttcgggtagtccgcctacccttattattttttgccaattttgaggagggagcacatgaaagtagcaatttatactagagtaagtacacttgaacaaaaagaaaaaggacactct

SEQ ID NO: 1326 - DNA, 260 bp, Artificial Sequence
  Description of Artificial Sequence: Synthetic polynucleotide
aaacaactactcacaatgagtcacaaatggagaaagtaccgcaaaataatcaaaatcaaggtgtagatcgtagaagttttaaagaaccattaccacgttcaactacaaatggagtggcaaatgaggcgtgggacggaaaaatataataattcatgggtagcttgcctacccttattatttttttacttttttaaggggtgatgaattatgaacgtagctatttacgttcgtgtcaggtcagtacattagaacaaaaagaa

SEQ ID NO: 1327 - DNA, 260 bp, Artificial Sequence
  Description of Artificial Sequence: Synthetic polynucleotide
ggacttgacccaaacttcgtacgacataatgacaacatggtaaaagaatggcaaaatcaaatgcgagaacacaacgaaaactttaatcctgaatctggtggagatttgtataacgtcgaaaccggtaactacgttgatgatgaataaaattatggggtagtccacctacccttattatttttttacttttttaaggggtgatgaattatgaacgtagctatttacgttcgtgtcaggtcagtacattagaacaaaaagag

SEQ ID NO: 1328 - DNA, 260 bp, Artificial Sequence
  Description of Artificial Sequence: Synthetic polynucleotide
gaatatgtaaaacttaagaacaggcattccattgaaataaaagatatagaattttattaacatatgtacggaagtatagacacctgattaatatttaaggcgtatacttccgtaaaaaataacccacgcccataaagaacgtggtttagaacatagtatcaatttaaaattgggaacaaaaattattatacaataaaaaagagggtagacatagcgactacccttgtataatgacgtggtaattatattataacagatta

SEQ ID NO: 1329 - DNA, 260 bp, Artificial Sequence
  Description of Artificial Sequence: Synthetic polynucleotide
gagtatgtaaagtttaaaaacaggcattctatcaaaataaatgatatagaattttattaacatatgtacggaagtatagacactcgattaatatttaatgtgtatacttccgtatttttatttatagaacccgtcgaatttgatggatttagattatccgtgtcgaaatcgaggcggttaaaataaaaaagaccgcaccttttaaggtacggtttgaacgatttactcatttaaaacacaaataataaaactaaaattat

SEQ ID NO: 1330 - DNA, 260 bp, Artificial Sequence
  Description of Artificial Sequence: Synthetic polynucleotide
gaatatgtaaagcttaaaaataggcattctattaaaataaacgatatagaattttattaacttatgtacggaagtatagacactcgattaatatttaatgtgtatacttccatatatttttgtataaaacccgtcgaattcgacgggtttagattatccgtatcgaaatcgaggcggttgaaataaaaaaagaccacccagtgacatgtgtgggtagttaaaagtaaacggtgcagtcagcttcttactgctaaacgcaa

SEQ ID NO: 1331 - DNA, 260 bp, Artificial Sequence
  Description of Artificial Sequence: Synthetic polynucleotide
cgcggcccggggtttgacccgtcgagcgtgcggttcgtgtggggccgatctgcagattgacgctcggcatgcaccgatgcgcacgcgtcggcgggtgttttagggtgcccgcacggcggtgcgtcgaagtgtgcatcgcagcacaattgaatacatacaacagaatagagcccggcaaatgcgcacgatcagcgttgaagagtacgccgaacaggtcgccgcggcggcaccgccgttgacggacgcgcagcgtggacggc

SEQ ID NO: 1332 - DNA, 260 bp, Artificial Sequence
  Description of Artificial Sequence: Synthetic polynucleotide
ctcgaatgtttaatcgaaaagaacggtggtcaatttaactattctaatgtaattacacattataatttaaagatgggccaagaaatttacttaaaataaaaaataacgcaccctccggccaagaagatgtgcgttaaaaatagaaccaaaataggcttatttagttacgcctattttaccaaaaataatgaggtgaaacaatggcaaatgaaataaaacaagttgcgttatacatacgtgtgtctacagatcaacaagct

SEQ ID NO: 1333 - DNA, 260 bp, Artificial Sequence
  Description of Artificial Sequence: Synthetic polynucleotide
attgaggaagagttaatagaagaaatgaaggttattaatgaccaaaaatacaacatttaatatgttgtatcttaagctcaaaattgagcttaaaaataactcaattttaaaatttaaaaacaatactttaattacttaattaacaaaacaggtaataaatatgattgaacgcagtcttgctctattctttggtttaattgtaggtatcgtaggatacatatattcaaccaaaaagaaaactattaaagaaaattttttac

SEQ ID NO: 1334 - DNA, 260 bp, Artificial Sequence
  Description of Artificial Sequence: Synthetic polynucleotide
atggattcgatgcaactctaaaaagattttataagttccaagatggaattactttagaacctgaaagttataatcctgaatataaaacacaattttttgattctaaaacacaggaacacactcctgttgtagtaaaaggaaaattagtttggtatatggcaccacttaacgttaaattctaagtgtaagaggtgattattttgactaaggctgctatatatattcgtgttagtactcaagaccaagtagaaaattatagt

SEQ ID NO: 1335 - DNA, 260 bp, Artificial Sequence
  Description of Artificial Sequence: Synthetic polynucleotide
ccttgatgtaactgaaaagtttctaaatgaagctttagaatgttataaaagtaaatatggtttttcagctacactagataattatgtgatattttttgagccaagatttagtattatgaatgcaaattttttgtaacaattcatagtatatttaagagccgttcagctcctcttaaatatacaataagggggaatgtaaaatgttaagagtagcactttatatacgtgttagtacagaagaacaagctttaaatggagat

SEQ ID NO: 1336 - DNA, 260 bp, Artificial Sequence
  Description of Artificial Sequence: Synthetic polynucleotide
acaacacgaccggaaaaataccaaacggaaaaaatatgaatgcacaattccatgcagggattaatgaaagcggaaatattgaaatcatctttaacttattttccgatgcaaatttaacttttcatgcaaaaatttaaaagagagcctcctggcttttctttttaccgaaaaaagaacatacgtacggaaggagaaaggaaatgaaggcagctatttatatacgtgtttctactcaagagcaagtagaaaattattcaata

SEQ ID NO: 1337 - DNA, 260 bp, Artificial Sequence
  Description of Artificial Sequence: Synthetic polynucleotide
atctaaaatagtagaaaatatatatcaagaaatgaataaagaacaaaaagaaagcctaggattaaaaaatcatgaatttaaaaaaaatgctgagttaagtgataaagcaagaaaattaatatttagtggtaattaaaagagagccattaggcttttctttttaccaaaaaaaagaacgtatgtgcgaaaggagaacggaaatgaaggcagctatttatatacgcgtatctactcaagaacaaatagagaattactctata

SEQ ID NO: 1338 - DNA, 260 bp, Artificial Sequence
  Description of Artificial Sequence: Synthetic polynucleotide
atggattcgatgcaactctaaaaagattttataagttccaagatggaattactttagaacccgaaagttataatcctgaatataaaacacaattttatgattctaaaacacaagaacacactcctgttgtagtaaaaggaaaattagtttggtatatggcacctcttaacgctaaattttaaatgtaaaaggtgattattttgactaaagcagctatatatattcgtgttagtacgcaggaccaaattgaaaactatagt

SEQ ID NO: 1339 - DNA, 260 bp, Artificial Sequence
  Description of Artificial Sequence: Synthetic polynucleotide
tgtggagaaccatcagaactcaattttgagttttgactcatatcagacgggctcaattttgagccggttaaaagttggccacaattagacaacgcataatccaattttggattttgataaaagaatttagccgggctcaatttagatccgggctccatatcacgagagcgcaattttgcgctctcctctaaatcgttgatatgttggaggtatgtatgaagatagcagtttatgtcagagttagcacgttggaacaagcg

SEQ ID NO: 1340 - DNA, 260 bp, Artificial Sequence
  Description of Artificial Sequence: Synthetic polynucleotide
gttatcaacgaccaaaaatacaaaattttaaaattgtcaccgaagaaagtttttgattaattttaatgatactaagtatcattaaaattattaacgtattttttttgaagtaccacagttggggtcgtcaaccaccaattttttatccataaaattttgcataattttagtacacaagtagttaatatcttgggcattccaaaatgcaactcttttgtaatctcttagagtaccaccactctctaaaatattagtaaatt

SEQ ID NO: 1341 - DNA, 260 bp, Artificial Sequence
  Description of Artificial Sequence: Synthetic polynucleotide
agtgaagaagagttagtggaagaaatgaaagtgatcaacgaccaaagatacaacgtttaaaggttaaatataccttaaaaatcaaaaagtggctaccctccactagttgatttaatgaccgaatgggccattaaattaaaaacttgaacttaaccgaagggggtccccttcggttagaagacataattgattacactctttaactctttaaaattgaattccttcttattaaaaaattattaataaaaatggcaatagtt

SEQ ID NO: 1342 - DNA, 260 bp, Artificial Sequence
  Description of Artificial Sequence: Synthetic polynucleotide
actgaagaagagttaattgaagaaatgaaggttacaagcgaaagtaaacgtaatatttaaattaataaatttaaattattaataaatgggtaacactaccgcgtccgaaagtactattgaaccagaagataattgtgaacacggttttgataccaataccggttcttataatcatttgaacaatgatagtttggagtctatccactataaaaatgattataatggcgaaattctagaaggacatcctgtagctgatgtcc

SEQ ID NO: 1343 - DNA, 260 bp, Artificial Sequence
  Description of Artificial Sequence: Synthetic polynucleotide
gtcaggggagcccccgtcaggggtcagtctccaggagccgtttcaatgccaacgtacgatagatccatgcgcgtgataggccgactgagaatctcctgacaaaccgaggagtctacgtctatcgaacgtcagcgtgagctcatacagaactggctgatacccacgatcacgagatcgtcgggtgggccgaagacaaggatgtgtccggttcggtagacccgttcgacaccccagggctcggtccctggttgaagcgtgac

SEQ ID NO: 1344 - DNA, 260 bp, Artificial Sequence
  Description of Artificial Sequence: Synthetic polynucleotide
actgaaaaagagtttattaaaaaaatgaaggttattaataaccaaaaattatatgtttagattttaatgtttaattaaacattaaaattcatttgtagaaaattgatttttttttaaaaaaaaatagttaaataaactatacaatggaagacaaaaatattattatcaacgatactaaatataacttcttcaaattctataacgtaaatcaaccactaactgaacttaaatacttcaattgtgaaagattggtttttgca

SEQ ID NO: 1345 - DNA, 260 bp, Artificial Sequence
  Description of Artificial Sequence: Synthetic polynucleotide
ccccaggtgaagtcgcggctcgctcccctgtcgtcggtcgagcgagtgatcatctcctgaacgcagaaaagccccgcactccacaagggagccggggctgtctgctacgcggtgagtccgagaaggactctcaccacgcgaacttgctcgggagtgggaggcggaggcgcgggcctctgcctgtccagctcgatggcttcggcgagggtcagggcgcgaccctcccgtgcttctggaagcaccgccaggtgatcggcatc

SEQ ID NO: 1346 - DNA, 260 bp, Artificial Sequence
  Description of Artificial Sequence: Synthetic polynucleotide
acccaagatgagttgatagaagaaatgaaggttacaagtaaccaaaagtacaatgtttaaaaaagttttttaatgcttttagaaaagcatgtcaggaagtcatactgtatttttaaatggtacttcatattcatcaagcataaatttaatggtttaaataaccattaaatttaaacaaaacgatcaataataagatgagagttattggttgctggagaaccatctattgttacaatgtttggtccaacattttgaagttt

SEQ ID NO: 1347 - DNA, 260 bp, Artificial Sequence
  Description of Artificial Sequence: Synthetic polynucleotide
ccccaggtgaagtcgcggctcgctcccctgtcgtcggccgagcgagtgatcatctcctgaacgcagaaaagccccgcactccacaagggagccggggctgtctgctacgcggcgagtccgagaaggactctcaccacgcgaacttgctcgggagtgggaggcggaggcgctggcctctgcctgtccagctcgatggcttcggcgagggtcagggcgcgaccctcccgtgcttctggaagcaccgccaggtgatcggcatc

SEQ ID NO: 1348 - DNA, 260 bp, Artificial Sequence
  Description of Artificial Sequence: Synthetic polynucleotide
ccccaggtgaagtcgcggctcgctcccctgtcgtcggccgagcgagtgatcatctcctgaacgcagaaaagccccgcactccacaagggagccggggctgtctgctacgcggcgaatccgagaaggactctcaccacgcgaacttgctcgggagtgggaggcggaggcgctggcctctgcctgtccagctcgatggcttcggcgagggtcagggcgcgacccccccgtgcttctggaagcaccgccaggtgatcggcatc

SEQ ID NO: 1349 - DNA, 260 bp, Artificial Sequence
  Description of Artificial Sequence: Synthetic polynucleotide
ccccaggtgaagtcgcggctcgctcccctgtcgtcggccgagcgagtgatcatctcctgaacgcagaaaagccccgcactccacaagggagccggggctgtctgctacgcggtgagtccgaggaggactctcaccacgcgaacttgctcaggagtgggaggcggaggcgctggcctctgcctgtccagctcgatggcttcggcgagggtcagggcgcgaccctcccgtgcttctggaagcaccgccaggtgatcggcatc

SEQ ID NO: 1350 - DNA, 260 bp, Artificial Sequence
  Description of Artificial Sequence: Synthetic polynucleotide
ccccaggtgaagtcgcggctcgctcccctgtcgtcggctgagcgagtgatcatctcctgaacgcagagaagccccgcactccacaagggagccggggctgtctgctacgcggcgagtccgaggaggactctcaccacgcgaacttgctcgggagtgggaggcggaggcgcgggcctctgcctgtccagctcgatggcttcggcgagggtcactcgacccgctcctcgccgtacacccgactgatctcctcgcgaaggtgg

SEQ ID NO: 1351 - DNA, 260 bp, Artificial Sequence
  Description of Artificial Sequence: Synthetic polynucleotide
accgaagaagagttgatggaagagatgaaggttatcaacgaccaaaaatacaatgtttaggtatttaaaaatttaatggttaaaaaactattaaatttaaacaaaacgatcaatgataagatgagagttattggttgctggagaaccatctattgttacaatgtttggcccgacattttgaagtttaaccgaaaaagtaaactgtgaaagtggagaaaccgattttaatgctaccaattccacttgatttacgaaacctt

SEQ ID NO: 1352 - DNA, 260 bp, Artificial Sequence
  Description of Artificial Sequence: Synthetic polynucleotide
gacgaaaataaattagtggaagaaatgaaggtcattaacgatagtaaacgtgacatttaaaatattaatttttaaagttcaattgaactttaattaatttttaaagttcaatcaaactttaaaaatttaaacaatacatttgccaatttttgatttagaagagtgaaagtccacaaataatgatggatctttccattcgatatggttaatacaatccgtaaaatatttaaacgattttatatctttagttttactttcag

SEQ ID NO: 1353 - DNA, 260 bp, Artificial Sequence
  Description of Artificial Sequence: Synthetic polynucleotide
gatgagcaagaattagtggaagaaatgaaggttataaacgatagtaaaagagatgtttaattttaattaaaataattttaatgatacttagtatcattaaaattaacgtattttttttgaagtaccacagttggggtcatcaactaccaattttttatccataaaattttgcataattttagtacacaagtagttaatatcttgcgcattccaaaatgcaactcttttgtaatctcttaaggtaccgccagactgtaaaa

SEQ ID NO: 1354 - DNA, 260 bp, Artificial Sequence
  Description of Artificial Sequence: Synthetic polynucleotide
gatgaagaaaaattagtggaagaaatgaaggctacagatagtagtaaacgagatatttaaattattttaatgctaaagaagcattaaaataaatgcttataaatggtataatagctatatctcaagatggtggaattggaagtaataacactcttccttggaaattgaaagaagaacttaaacattttcaagatgttacgacttctactcaagatagtagtaaaaaaaatgctgttattatgggtcgaaaaacatgggat

SEQ ID NO: 1355 - DNA, 260 bp, Artificial Sequence
  Description of Artificial Sequence: Synthetic polynucleotide
tttaattgatgatttagaaaatttggcagatcatcaacctaacaatgttatttgtgttaaaccatttttttatgataaagaagaagcctacgaagataaagaattatttaaagttaaagatgctttaattaaaattacttaatttttagaaaaaatttattttttaacaattttttattgttaaaaaatacattaaataaatggaaacaaaaccaagactgacaattgaacaacgtgcaaatgtttttaaaaaataccaa

SEQ ID NO: 1356 - DNA, 260 bp, Artificial Sequence
  Description of Artificial Sequence: Synthetic polynucleotide
aaaaaattctaacagttgataaagttaaccataattctcatttgtttgttaatgcaaaattagaagaaaaagagccagaagtgtgtactttttgtgaaggttgataaaatttaatttttaaagtctaattagactttaaaaattgtgaataaatatgtataaaaatttttttagtttattttttaaactaaaaaaaagtaatgcaaggaagttataaaaacaagttaacgttggaacagcgtaataccatagttcaaatg

SEQ ID NO: 1357 - DNA, 260 bp, Artificial Sequence
  Description of Artificial Sequence: Synthetic polynucleotide
ccttcacaaatagatgaatggaacaaaacaaaaccaactactcacgatgaatcacaaatggaacaagtaccacaagaccattctggtggccacccctcaattttcggaacagatacgccaccaaaaaaataattaaataaatttatatgggtagtccgtctacccttattattttttacttttttagggagtgatgaattatgaacgtagctatttacgttcgtgtcagtacgttagagcaaaaagaacacggtcattct

SEQ ID NO: 1358 - DNA, 260 bp, Artificial Sequence
  Description of Artificial Sequence: Synthetic polynucleotide
gatgaagaaaaattagtggaagaaatgaaggctacagatagtagtaaacgagatatttaaattattttaatgctaaagaagcattaaaataaatgcttataaatggtatagtagctatatctcaagatggtggaattggaagtaataacactcttccttggaaattgaaagaagaacttaaacattttcaaaatgttacgacttctactcaagatagtagtaaaaaaaatgctgttattatgggtcgaaaaacatgggat

SEQ ID NO: 1359 - DNA, 260 bp, Artificial Sequence
  Description of Artificial Sequence: Synthetic polynucleotide
actgaagaaaaattaatggaagaaatgaaggttattaacgaccaaaaatataatgtttaaattaaggttttttaatctctgtatatagagattaaaaaacatgtttgaaattgtgtaatttcaaacaggtaataaatatgattgaacgcagtcttgctctattctttggtttgattgtaggccttatgggttacatatattcaaccaaaaagaaaactataaaagaaaattttttacccgctatgacttataaagtagac

SEQ ID NO: 1360 - DNA, 260 bp, Artificial Sequence
  Description of Artificial Sequence: Synthetic polynucleotide
accgaaaaagagttaatggaagaaatgaaggttattaatgaccaaaaatataatgtttaaattaaggttttttactctctatacacagagattaaaaaacatgtttgaaattgtgtaatttcaaacaggtaataaatatgattgaacgcagtcttgctctattctttggtttgattgtaggccttatgggttacatatattcaaccaaaaagaaaactataaaagaaaattttttacccgctatgacttataaagtagac

SEQ ID NO: 1361 - DNA, 260 bp, Artificial Sequence
  Description of Artificial Sequence: Synthetic polynucleotide
atttcagaagatgggcagataagtgtaaaattcttagaggggacagaggtagacttgtaagtgactgtgactgaaaggttgcagttttttcgttttagtggtataatagccgtataaatcataattgatggtgaattacatggaaaataatttgaatttcgatatttacgagcatcactttggagcattatattatcacataaaatctttgattggggaatcccctatctatgatgaaactattgatgaggaagatttaa

SEQ ID NO: 1362 - DNA, 260 bp, Artificial Sequence
  Description of Artificial Sequence: Synthetic polynucleotide
cattaaggaaggaaaagcagcttgtcaagggatgcgtgtgccagaagtagacatttcaaattgggagataacctcaccaattacagtattagaaagggatagaaatggggaaaagtattacagttattccggccaagaaagtgcagaccagcgttcttcatcaggtcaggaagaaaatcaaggtagccgcatattgtcgagtgtccaccgaccaagaagaacagctatcaagttatgaaaaccaagttaattattacaga

SEQ ID NO: 1363 - DNA, 260 bp, Artificial Sequence
  Description of Artificial Sequence: Synthetic polynucleotide
gataggattgagatatttgagaacggggatataaaaatcgtctacaggatagaaatgtagtctttactagctacaattatgcataacaaatgaaatgtataattgtaactagtaattacagttataaaaactttctcaatatttttcagaagaatgggagaatacatgttctcatttatatggtagaatattttgtaaatacagggagaagacgttatttgtttgagatgaagggggcttttcaattgagatttcacaaa

SEQ ID NO: 1364 - DNA, 60 bp, Artificial Sequence
  Description of Artificial Sequence: Synthetic oligonucleotide
attgtggaggatggacagataactgtcagatttttagaggggactgaggtagaattataa

SEQ ID NO: 1365 - DNA, 60 bp, Artificial Sequence
  Description of Artificial Sequence: Synthetic oligonucleotide
atttcagaagatgggcagataagtgtaaaattcttagaggggacagaggtagacttgtaa

SEQ ID NO: 1366 - DNA, 260 bp, Artificial Sequence
  Description of Artificial Sequence: Synthetic polynucleotide
atctcagaagatgggaagataagtgcaaaattcttagaggggactgaggtagatttgtaagtgactgtggccgaaaggttgcagtttttttcgtttttagtggtataatagccgtataaatcataattgatggtgaattacatggaaaataatttgaatttcgatatttacgagcatcactttggagcattatattatcacataaaatctttgattggggaatcccctatctatgatgaaactattgatgaggaagattt

SEQ ID NO: 1367 - DNA, 260 bp, Artificial Sequence
  Description of Artificial Sequence: Synthetic polynucleotide
atttcagaagatgggcagataagtgtaaaattcttagaggggactgaggtagatttgtaagtgactgtggccgaaaggttgcagtttttttgttgtttcgtggtataataaaactaatttaatgaatgataaaaggataggaggactaaataatggcaaatgaactacagccgctttctttactttttcaaaacagacttttcagaattccggattatcagagaggctatgcttggcagcagtcacagcttactgatttt

SEQ ID NO: 1368 - DNA, 260 bp, Artificial Sequence
  Description of Artificial Sequence: Synthetic polynucleotide
atctcagaagatgggcagataagtgcaaaattcttagaggggactgaggtagatttgtaagtgactgtggccgaaaggttgcagtttttttcgtttttagtggtataatagccgtataaatcataattgatggtgaattacatggaaaataatttgaatttcgatatttacgagcatcactttggagcattatattatcacataaaatctttgattggggaatcccctatctatgatgaaactattgatgaggaagattt

SEQ ID NO: 1369 - DNA, 260 bp, Artificial Sequence
  Description of Artificial Sequence: Synthetic polynucleotide
gaaaagttgatagaagaaatgaaagttattaacgatcaaaaacttaatattagaatttaattatatttttaatggttattaaccattaaaaactactgaaggtatcccaattgttttaactttaattgaaggtaaccaccaatatcatttaattttatggtataaggcacctcaattaaatttataccattctcttgacacattcgtcttttaagttcatctctatatttttggttggttgaagcatcagtatttcgatg

SEQ ID NO: 1370 - DNA, 260 bp, Artificial Sequence
  Description of Artificial Sequence: Synthetic polynucleotide
ttagaagaagaacttattaaagaaatggaggttattaacgaccagagatacaacgtttaagtttattattttttaaactcatttttgagtttaaaaaattatattaattccggtaaaagtaaaccataaaaccaatttccattaacattaattgtaatagcatcgattgatggatcttttgttccaatagaatactgttttacactctgttgattaaaaacagttacgtttacttttgtttcatcgagaacaattttggt

SEQ ID NO: 1371 - DNA, 260 bp, Artificial Sequence
  Description of Artificial Sequence: Synthetic polynucleotide
actgaagaaaaattaatggaagaaatgaaggttattaacgaccaaaaatataatgtttaaattaaggttttttaatctctacacccagagattaaaaaacatgtttgaaattgtgtaatttcaaacaggtaataaatatgattgaacgcagtcttgctctattctttggtttgattgtaggccttatgggttacatatattcaaccaaaaagaaaactataaaagaaaattttttacccgctatgacttataaagtagac

SEQ ID NO: 1372 - DNA, 260 bp, Artificial Sequence
  Description of Artificial Sequence: Synthetic polynucleotide
ctgtcgaacatgaccgtggatgaccacgtcaccatcgagtggcgagacgtggccgagtagcagatacgacgaagccccggctacccccttctgagggtgccggggctttcgtgtgtcagttgtggtggccgctctccaggcggtcgatctcttcgagggacgcttcgtagttgccggcctcctggaggaggagcaggcggaggtcggcgagcttgacctgcacccacacggggagcttcttctcgcgctcgctgttgaag

SEQ ID NO: 1373 - DNA, 260 bp, Artificial Sequence
  Description of Artificial Sequence: Synthetic polynucleotide
gatgagcaagaattaatagatgaaatgaaggttatcaatgatcagcggtataacatttaattttttatttttaagttcatttgaacttaaaaataatttaatttaaagaattaaaatgggtatctataattacttaattatcaaacaggtaataaatatgattgaacgcagtcttgctctattctttggtttaattgtaggccttatgggctacgtatattcaaccaaaaagaaaactattaaagaaaattttttaccat

SEQ ID NO: 1374 - DNA, 60 bp, Artificial Sequence
  Description of Artificial Sequence: Synthetic oligonucleotide
cttggagaagacggcagcatcaccattaagtttttagaaggaacagaagtgaatttataa

SEQ ID NO: 1375 - DNA, 60 bp, Artificial Sequence
  Description of Artificial Sequence: Synthetic oligonucleotide
atatcagaaagtgggcagattactgtaacatttctcgaaggaacagaagttgacttataa

SEQ ID NO: 1376 - DNA, 260 bp, Artificial Sequence
  Description of Artificial Sequence: Synthetic polynucleotide
tacgagcagcatctcaggctcggcagcgtggtcgaacagctacacgccgggatgtcgtagagcggctacccccgagaacgcagaaaagccccctacgcgccgtgtaagggcacgcagagggctctctggtagtctctattcagttgtgtggttgcgtccgtcagcgtggacgctagaggggtttacggggcctttccagcctggcgtctgcgcccgcctgtaagggtgtgtgagcagtgcagtacgggtctacccggctg

SEQ ID NO: 1377 - DNA, 260 bp, Artificial Sequence
  Description of Artificial Sequence: Synthetic polynucleotide
gagcaagaattggtggaagagatgaaggtcataaatgatcaaaaacttgatattaaatagactatatttaacaatttttaatagttaattaaccattaaaaattactgaagatatcctaattgttttaactttaattgaaggtaaccgccgatatcatttaattttatggtataaggtacttcaattaaatttataccattttcttgacacattcgtcttttaagttcatctctatatttttggttcgttgaagcatcaa

SEQ ID NO: 1378 - DNA, 260 bp, Artificial Sequence
  Description of Artificial Sequence: Synthetic polynucleotide
tacgagcagcatctcaggctcggcagcgtggtcgaacggctacacgccgggatgtcgtagagcgactacccgagaacgcagaaaagccccctacgcgccgtgtaagggcacgcagagggctctctggtagtctctattcagttgcggggttgcgtccgtcagcgtggacgctagaggggtttacggggcctcgtggacccgtacgtacggctgcagaggcttgtcacggtaggcgtggtagcgctcggcctcctcgacgc

SEQ ID NO: 1379 - DNA, 260 bp, Artificial Sequence
  Description of Artificial Sequence: Synthetic polynucleotide
gaagaagaagagttgttggaagagatgaaggttatcaacgaacagaagtatgatgtttaacaagtaattctttaatggttttaaaaccattaaagtttttatttatttttagtagatgcaatgaaggttagccaaaaaaatgtttttaaagtctaattagaaattaaaaacaatcgtttgaaacagtcaagatcgaagcgttaaaaaataaaatgaaatttaattaataaaaaagagtaaaataaactatgactaaaaat

SEQ ID NO: 1380 - DNA, 260 bp, Artificial Sequence
  Description of Artificial Sequence: Synthetic polynucleotide
gtacgaaaggacgtgattagggacatgaaagtagcactttatgtccgtgtcaggtatcgacactagaacaagcagaagaaggttactcaattaatgaacaaaaagataaacttaaaaaatattgtgaaattaaagattggacgattgttaaagagtacgtagatcctggtcgctccggatcaaatatcaatcgccccagcatgcaacagcttatcaaagatgcagatacaggattatacgatgctgtgcttgtctataaa

SEQ ID NO: 1381 - DNA, 260 bp, Artificial Sequence
  Description of Artificial Sequence: Synthetic polynucleotide
attatccaagtcaacagtagtggatactccaggatctaatgtaactcctggtaatgataattttggtgcaagtttaacctccatttattttatactttattcatcctcatcttcatcaaatggattagtcgaccttggtcttgaagggatatgtaaaaaatttttttaaaaaaaaatttaccatttgtgtaataataaagatgagttcgcataaattgacaatagaagaacatcaaactattattgatttgtataacaat

SEQ ID NO: 1382 - DNA, 260 bp, Artificial Sequence
  Description of Artificial Sequence: Synthetic polynucleotide
aatattggtaaaagttcagttaaagagtttaagacaattcaacttgcaattgtagaataactcaagtatacttatttaaagccgcttgagaaatcggcgacttttgttttataaaggaggaaatatggaatataaagcaggtgatatagtggttgctagaaatattcataatgaaaataaggaatttattttcgaggttgacgatattgttgtacaagatggggtacaacttctttatggtaaagatgtttttagcggaa

SEQ ID NO: 1383 - DNA, 260 bp, Artificial Sequence
  Description of Artificial Sequence: Synthetic polynucleotide
aatattggtaaaagttcagttaaagagtttaaaacaattcaacttgcaattgtagaataaataaggtatagttgttttgggccgtttgatgagagtcggcggcttttgttttataaaggaggaaatatggaatataaagcaggtgatatagtggttgctagaaatattcataatgaaaataaggaatttattttcgaggttgacgatattgttgtacaagatggggtacaacttctttatggtaaagatgtttttagcgg

SEQ ID NO: 1384 - DNA, 260 bp, Artificial Sequence
  Description of Artificial Sequence: Synthetic polynucleotide
gttgaaatttaggaaagtgatctatggctgattttacaggaaaaacagctacattatcaaatacatagaaatggtcaataaccacttcaacgtccataggtatatttgtcatttattatttgcaatgtttaccctttaatcaaattgttgttaattaaatttttatgttaaatttaaatgttaaatttttcagtaaataaatggaaactaaaaaaaagttaacaactcaacaacgtttagatataataaaattttatcag

SEQ ID NO: 1385 - DNA, 260 bp, Artificial Sequence
  Description of Artificial Sequence: Synthetic polynucleotide
caaagtagccgcatattgccgagtgtccaccgaccaagaagagcagctatcaagttatgaaaaccaagttaattattaccgagagtttatctctaaacacgaggactatgagttagttgacatctatgcggatgagggcatctcagcaactaataccaaaaaacgtgatgcttttaaccgcttgatacaagattgtagggctggtaaggtggataggattttggtaaagtcgatcagtcgctttgcaagaaacacccttg

SEQ ID NO: 1386 - DNA, 260 bp, Artificial Sequence
  Description of Artificial Sequence: Synthetic polynucleotide
caaagtagccgcatattgtcgagtgtccaccgaccaagaagaacagctatcaagttatgaaaaccaagttaattattaccgagagtttatctctaaacacgaggactatgagttagttgacatctatgcggatgagggcatctcagcaaccaataccaaaaaacgtgatgcttttaaccgcttgatacaagattgtagggctggtaaggtggataggattttggtcaagtcaattagtcgatttgccagaaacacccttg

SEQ ID NO: 1387 - DNA, 260 bp, Artificial Sequence
  Description of Artificial Sequence: Synthetic polynucleotide
caatgtagccgcatattgccgagtgtccaccgatcaagacgaacagctatcaagttatgaaaaccaagttaattattaccgagattatatctccaaacacgaggactatgagttagttgacatctatgcggatgagggcatctcagcaaccaataccaaaaaacgtgatgcttttaaccggttgatacaagattgtagggctggtaaggtggataggattttggtcaagtcgatcagtcgatttgccagaaacacccttg

SEQ ID NO: 1388 - DNA, 260 bp, Artificial Sequence
  Description of Artificial Sequence: Synthetic polynucleotide
caaggtagccgcatattgtcgagtgtccaccgaccaagaagaacagctatcaagttatgaaaaccaagttaattattaccgagagtatatctccaaacacgaggactatgagttagttgacatctacgcggatgagggcatctcagcaaccaataccaaaaaacgtgatgcctttaaccgcttgatacaagattgtagggcaggtaaggtggataggattttggtcaagtcaatcagtcgatttgccagaaacacccttg

SEQ ID NO: 1389 - DNA, 260 bp, Artificial Sequence
  Description of Artificial Sequence: Synthetic polynucleotide
caaggtagccgcatattgtcgagtgtccacagaccaagaagaacagctatcaagttatgaaaaccaagttaattattaccgagagtttatctcaaaacacgaagattatgagttagttgacatctatgcggatgagggcatctcagcaaccaataccaaaaaacgtgatgcttttaatcgcttgatacaagattgtaaggctggtaaggtggataggattttggtcaagtcgatcagtcgctttgccagaaacacccttg

SEQ ID NO: 1390 - DNA, 260 bp, Artificial Sequence
  Description of Artificial Sequence: Synthetic polynucleotide
caaggtagccgcatattgtcgagtgtccaccgaccaagaagaacagctatcaagttatgaaaaccaagttaattattaccgagattatatctccaaacacgaggactatgagttagttgacatatatgcggatgagggcatctcagcaaccaataccaaaaaacgtgatgcttttaaccggttgatacaagattgtagggctggtaaggtggataggattttggtcaagtcgatcagtcgatttgccagaaacacccttg

SEQ ID NO: 1391 - DNA, 260 bp, Artificial Sequence
  Description of Artificial Sequence: Synthetic polynucleotide
caaagtagccgcatattgccgagtgtccaccgaccaagaagagcagctatcaagttatgaaaaccaagttaattattaccgagagtttatctctaaacacgaggactatgagttagttgacatctatgcggatgagggcatctcagcaaccaataccaaaaaacgcgatgcttttaatcgcttgatacaagattgtaaggctggtaaggtggataggattttggtcaagtcgatcagtcgctttgccagaaacacccttg

SEQ ID NO: 1392 - DNA, 260 bp, Artificial Sequence
  Description of Artificial Sequence: Synthetic polynucleotide
cagagtggccgcctattgtcgggtgtccaccgaccaagacgaacagctatcaagctatgagaaccaagtcaattactaccgtgactttatctcaaagcacgaagactatgagctagtggacatctatgcagacgaggggatttccgcaaccaacaccaaaaaacgtgatgcctttaaccgactgatacaagattgtagagatggtaaggtggataggattttggttaagtccatcagtcgatttgcgaggaataccttgg

SEQ ID NO: 1393 - DNA, 260 bp, Artificial Sequence
  Description of Artificial Sequence: Synthetic polynucleotide
caaggtagccgcatattgtcgagtgtccaccgaccaagaagaacagctatcaagttatgaaaaccaagttaattattaccgagattatatctccaaacacgaggactatgagttagttgacatctatgcggatgagggcatctcagcaaccaataccaaaaaacgtgatgcttttaaccggttgatacaagattgtagggctggtaaggtggataggattttggtcaagtcgatcagtcgatttgccagaaacacccttg

SEQ ID NO: 1394 - DNA, 260 bp, Artificial Sequence
  Description of Artificial Sequence: Synthetic polynucleotide
cagagtggccgcctattgtcgagtgtccaccgaccaagacgaacagctatcaagctatgagaaccaagtcaattactaccgtgactttatctcaaagcacgaagactatgagctagtggacatctatgcagacgaggggatttctgcaaccaacaccaaaaaacgtgatgctcttttacagaagacctacactgtggattttctcaccaagaaacgaacggaaaatgatgggcaggttaaccagttttatgttgccaaca

SEQ ID NO: 1395 - DNA, 260 bp, Artificial Sequence
  Description of Artificial Sequence: Synthetic polynucleotide
caatgtagccgcatattgccgagtgtccaccgaccaagacgaacagctatcaagttatgaaaaccaagttaattattaccgagattatatctccaaacacgaggactatgagttagttgacatctatgcggatgagggcatctcagcaactaataccaaaaaacgtgatgcttttaaccgcttgatacaagattgtagggctggtaaggtggataggattttggtcaagtcgatcagtcgatttgccagaaacacccttg

SEQ ID NO: 1396 - DNA, 260 bp, Artificial Sequence
  Description of Artificial Sequence: Synthetic polynucleotide
gtctttcctataaaaggtagaaaatatgaactgaaggttagaaaggagcacttcttatgaaaaacgtcataactattgaagcaaatgcgcctaggaactcagagttagctagcatttcgctacctaagaaacgtcgtgtagcaggttatgcgagggtatcaactgatcatgaagaccaaacaaccagctatgaatctcagatgaggtattatgcagaatacatttcaactcgaagcgattgggagtttgttaaaatgtac

SEQ ID NO: 1397 - DNA, 260 bp, Artificial Sequence
  Description of Artificial Sequence: Synthetic polynucleotide
gtctttcctataaaaggtagaaaatatgaactgaaggttagaaaggagcacttcttatgaaaaacgtcataactattggagcaaatgcgcctaggaactcagagttagctagcatttcgctacctaagaaacgtcgtgtagcaggttatgcgagggtatcaactgatcatgaagaccaaacaaccagctatgaatctcaaatgaagtattatacagaatacatttcaagtcgaagcgattgggagtttgtcaaaatgtac

SEQ ID NO: 1398 - DNA, 260 bp, Artificial Sequence
  Description of Artificial Sequence: Synthetic polynucleotide
ataatgagatgacctaccaactaacaatgatacaagcaaagatacttttaaagaaaggatcaatcacaattgaggaatttgaactttttagacaattgatgcttgaaaaatatcaaccgtttataagtcaattatcgacctaataactggataattttttcttttagagtgatatatagtagcgaaaggagtgtattaatttgagaacagttagaagaatacaacccataaaatcgccctgcaagccaagatttaaggtt

SEQ ID NO: 1399 - DNA, 260 bp, Artificial Sequence
  Description of Artificial Sequence: Synthetic polynucleotide
tgggttataccagtaaaaggaaggaaatatcctatagaaattagagaggggcgatattagtgaagaaagtaattactattcaggctacaccaagtattattaggtcaagttcagatgatttctctttgaaaaagcgtagagttgcaggctatgccagggtatcaactgaccatgaagaccaagcaacaagctatgagtcacagatgcggtactactctgaatacattagtgggagggatgattgggaatttgttaaaatg

SEQ ID NO: 1400 - DNA, 260 bp, Artificial Sequence
  Description of Artificial Sequence: Synthetic polynucleotide
ccggatggcggcctactgccgagtgtccaccgaccaagacgaacagctatcaagctatgagaaccaggtccgttactaccaggactacattcggcagaatcctctctacgagttggttgatatctatgcggatgagggaatttcaggaacaaacaccaagaaacgcacggagtttaatcggttgataggtgactgccggaaaggaaaagtagatagaatcattgtgaaatccataagccatttttccagaaacacgctgg

SEQ ID NO: 1401 - DNA, 260 bp, Artificial Sequence
  Description of Artificial Sequence: Synthetic polynucleotide
ccccaggtgaagtcgcggctcgctcccctgtcgtcggccgagcgagtgatcatctcctgaacgcagaaaagccccgcactccacaagggagccggggctgtctgctacgcggcgagtccgagaaggactctcaccacgcgaacttgctcgggagtgggaggcggaggcgctggcctctgcctgtccagctcgatggcttcggcgagggtcactacggcgcgaccctcccgtgcttctggaagcaccgccaggtgatcggc

SEQ ID NO: 1402 - DNA, 260 bp, Artificial Sequence
  Description of Artificial Sequence: Synthetic polynucleotide
tttgtttacgggaatgaagaagagaggctcaaggagcttagaattctggagctcccttaacctcttcgtacagcaagaagaggcaaaccctttttatagttatgccccttcaagatttttagtggtgagaccatatggagcttgttgatgaaatcagatggttgagggaggctttgcaggacctcgaagacagggttattaattgggtgtcaagacccagggtttacacgagtctcagggaagcgtttgagcacactgca

SEQ ID NO: 1403 - DNA, 260 bp, Artificial Sequence
  Description of Artificial Sequence: Synthetic polynucleotide
ctctattttgacgacgacaacattcaaatactaacacttaagcgaggacaattgaaatgaagaaagtcattaccattgaacctgctagacctgttcaccaagtagaagaaacctcagtattcactaggcgaagagttgcaggctatgctagggtatcaacagaccatgaagaacaagcgacatcgtatgaagctcaaatgaagtactatacggattacattaacagtcgtattgattgggagttcgtcaaaatgtattca

SEQ ID NO: 1404 - DNA, 260 bp, Artificial Sequence
  Description of Artificial Sequence: Synthetic polynucleotide
cctaatgaagtaattccatcaaataatcactcgccacataaagagaaccccacatgttgagacggtagtattgctatcatgggtagacaagggatagagtagaaacatgtgtaaataagcgctttccgtgatttgagatctggctccaagctagaaagatagtcacggttttttattttatgggaacttatccaagaatggcagaatgtaaggttgagtggctatattgactttagagctcgtgagttgatgaaattgct

SEQ ID NO: 1405 - DNA, 260 bp, Artificial Sequence
  Description of Artificial Sequence: Synthetic polynucleotide
gctaaggtgacctatagaaatggaaaagaaaaacacgtcatcattcagaaaggacggtagacatgaaaaaagttatcacgatagaaccagctaaacaagtcacccatatggttgacctgcccagctttactaaacgacgagtggcaggttatgcaagggtatccactgaccatgaagaccagacaacttcatatgaagctcagatgacatactacacagactacatcaacagtcgctcggattgggaatttgtcaagatg

SEQ ID NO: 1406 - DNA, 260 bp, Artificial Sequence
  Description of Artificial Sequence: Synthetic polynucleotide
gctaaagctacctatagaaatggagaagaaaaacacatcatcattcagaaaggacggtagacatgaaaaaagtcatcacgatagaaccagctaaacaagtaagccataaggttgacctgccgagctttaccaaacgacgagtggcaggctatgccagagtatcaactgatcatgaagaccagacgacctcctacgaagctcagatgaaatactatacagactacatcaacaatcgctcggattgggaatttgtcaagatg

SEQ ID NO: 1407 - DNA, 260 bp, Artificial Sequence
  Description of Artificial Sequence: Synthetic polynucleotide
gctaaagcgacctatagaaatggagaagaaaaacacgtcatcattcagaaaggacggtagacatgaaaaaagttatcacgatagaaccagccaaacaggtcacccataaggttgacctgcccagctttaccaaacgacgagtggcaggctatgccagagtatccactgaccatgaagatcagacaacttcctacgaagctcagatgacatactatacagactacatcaacagtcgctcagattgggaatttgtcaagatg

SEQ ID NO: 1408 - DNA, 260 bp, Artificial Sequence
  Description of Artificial Sequence: Synthetic polynucleotide
tcaaacaaaggttcaagttttacaattttacaaaaaccaaaagtacaatcgtattcttaaaatcttttaaattgaataccattttatttagaaacttgtcttccaatttaattcggaaaacctttatgggctttcgcacaacattgattcatctatattaaataacaattggccttctgattctcattattctttcttgaaaaactcaagaaaaaccaaagaatgtattcgataagttagatttctttgtttaacctact

SEQ ID NO: 1409 - DNA, 260 bp, Artificial Sequence
  Description of Artificial Sequence: Synthetic polynucleotide
attagagaagacgatatccgtctgggtaaaataaaggaaactgaattatgtaccctgtagataaagaatccagaattcgtttaatggaagatctggacaaatggataaatgaacactacttagaaaaagtcaccgtcaaagacctaagtcaccaactaggtgtgttcatcccagatgtttaccgtctgtttgctgaacaacgcaacactaccccgggagagtacctccgacgtaaacgtttagttaaagccaaagctttg

SEQ ID NO: 1410 - DNA, 260 bp, Artificial Sequence
  Description of Artificial Sequence: Synthetic polynucleotide
caagctgaccaagaccatgtcttagttagactagaagtaaaacccaagacggttagagaagcgttcctgaacgcctataagcgagcgggaggcattcctgtagagtgggacaatcgtctcgctgtttaaaccagtatcctgcttgctcttcagcaagcaggattattgttgtttgttaaatattcattaaaggatttattatgtccatagatacactaggaatcgacgatgaaatcgttttgaccacaatagcgaacatt

SEQ ID NO: 1411 - DNA, 260 bp, Artificial Sequence
  Description of Artificial Sequence: Synthetic polynucleotide
agctgacaaagacaacatgttggtcagaatcgaagtgaaacctaaaacggttactgaagctttcttacaagcttatcgtcgagctggatttgaaactgttccctgggaaggtcgcatggcttcctaatctcattccctacttgcttaacggcaagtagggttatttttacaaactcaatataaatcattaaggattaattatgtccatcgagttgcctatcgctgaagatccaatcacagcattaacttttaagaacata

SEQ ID NO: 1412 - DNA, 260 bp, Artificial Sequence
  Description of Artificial Sequence: Synthetic polynucleotide
gattttgttgtacttgatcctagttggaaatcggaagacattcacgaagtttttaaataagaaagaggtaaattatgcgttttaaagattttaatcttgaagttgttaatgttgaacgttactcatcagattatagcatgacggtgaacaagaactttgttacatttagtaaaggaattgtccaagctttagaatacccagcacatgtactggttgcctttaataaggatacaaaggtaatgggtatacaagtttgtcgt

SEQ ID NO: 1413 - DNA, 260 bp, Artificial Sequence
  Description of Artificial Sequence: Synthetic polynucleotide
gattttgttgtacttgatcctagttggaagtcggaagacatccacgaagtttttaaataagaaagaggtaaattatgcgttttaaagattttaatcttgaagttgttaatgttgaacgttactcatccgattatagtatgacggtgaacaagaactttgttacttttagtaaaggaattgtccaagctttagaatatccagcacatgtactggttgcctttaataaggatacaaaggtaatgggtatacaagtttgtcgt

SEQ ID NO: 1414 - DNA, 260 bp, Artificial Sequence
  Description of Artificial Sequence: Synthetic polynucleotide
tatcgacctaataactggataattttttcttttagagtgatatatagtagcgaaaggagtgtattaatttgagaacagttagaagaatacaacccataaaatcgccctgcaagccaagatttaaggttgcggcctatgcaagggtttctgatagtcgtcttcatcattcactgtcaacacagattagctactataaccgtttgatacaagcgcatcctgattgggaattggtagggatttattatgatgaaggcataagc

SEQ ID NO: 1415 - DNA, 260 bp, Artificial Sequence
  Description of Artificial Sequence: Synthetic polynucleotide
gcatcatcatgttcatgtaggacgttaggggaaaagcgacttttggcatcgtttaaaagcaagttaggcattgtcccagataaagagtgggttgaaaataatattaaacacatcgagtatgactttggttaccgtatcctcagggtaactccagtaaaaggaaggaaatatcttatagaaattagagagggtcgatattagtgaagaaagtaattactattcaggctacaccaagtattattaggtcaagttcagatgat

SEQ ID NO: 1416 - DNA, 260 bp, Artificial Sequence
  Description of Artificial Sequence: Synthetic polynucleotide
ggcttttttgtaattaaacctcgaaaggatggaaacaatgagtatcttagacaactttgatgtggttggtgttcctcgtacattcagtattgcagaggttcgaatcctgaagaaccgcatctcctttaaccttgcaacagcttccgagattggctatccgccgtttgtgcggctgtttatcagcagagacaaaacgcagattgcgttgcagccttgtgccaaagaaacgccgaacgcgatgaagttctttacatcggatt

SEQ ID NO: 1417 - DNA, 260 bp, Artificial Sequence
  Description of Artificial Sequence: Synthetic polynucleotide
ttacagaggaagagtttatagctaagaaaaaaataattttagggatttaaggtgtaaagttaaccgttaaaaaataaaaaagccccacgctctcaaactttggcgagtctgagcgtgaggcgaattctagtatagtaaaaacctgctttaagtaggtctctttactgtactcattttaacaaaaaatgaggtaaaaaacaatgagaaaagtagctatttactctagagtatcaacaataaatcaagccgaagaaggatat

SEQ ID NO: 1418 - DNA, 260 bp, Artificial Sequence
  Description of Artificial Sequence: Synthetic polynucleotide
cgcaagttcaaggccgtcactggccagacgcccaacaaataccaagcaaattacgactaaagggttgcatattgcgatgccatagcttactatctctccatattgataggagaaaccacatgggcatcaagacagtcatatcagacaacctaaagagaatcatggccgagcacgacctatccagtaacgagctggctaaccgctctgggctcccacagaagaccctctattcgatgatccacggcacccacaacagccgc

SEQ ID NO: 1419 - DNA, 260 bp, Artificial Sequence
  Description of Artificial Sequence: Synthetic polynucleotide
atatggttccaaaatagacgttgtaaagacagaaagttattttttgaaaaaaataattagacataatttagtgttttgaattgtacaattaatttaattgcacaattcaaattcataaactattaatttccattgaaaattaattacaattttttatgaatcaatgtatatccataaaagattatatcatacagcaccattatcattaatgaaagtatattcagttgaatgtttagtccatttcactgtcgttgaatttg

SEQ ID NO: 1420 - DNA, 60 bp, Artificial Sequence
  Description of Artificial Sequence: Synthetic oligonucleotide
agagacatagtttctagaaaaaatggaattttaatggggttgaaatgtgccggattttag

SEQ ID NO: 1421 - DNA, 260 bp, Artificial Sequence
  Description of Artificial Sequence: Synthetic polynucleotide
agagtgaagaaagaagaatatgaagctattttagttaagattcaatctttagttaagtaaacataatatttcataaggtcatctcttattagaaaataagaggtgactttttatgtctagaaaagaaataatagaaaattttattaaacaatcaaagaagcaattatctttaaaagaaatatcagagggaacaggcgttcctaattctacagttcataagatagtgaaggaattagggtatcaatgtgtaagacatcaag

SEQ ID NO: 1422 - DNA, 260 bp, Artificial Sequence
  Description of Artificial Sequence: Synthetic polynucleotide
aaacaccccctgcatcatccactctccatctacgactcattctgcagaggagtggcgtgatgatggaactgcaacatcaacgactgatggtgctcgccgggcagttgcaactggaaagccttataagcgcagcgcctgcgctgtcacaacaggcagtagaccaggaatggagttatatggacttcctggagcatctgcttcatgaagaaaaactggcacgtcatcaacgtaaacaggcgatgtatacccgaatggcagcc

SEQ ID NO: 1423 - DNA, 260 bp, Artificial Sequence
  Description of Artificial Sequence: Synthetic polynucleotide
tatgagccgttaagaagaagtgaacgaataaaaaatatggaagaaaaattgaataattaaatattctaaaaaatttatcgttaaagtagtgttatatacaatgtccgcaacattacttagtttaatttcgaaaatagaaaatccatcagattctctatcagcaattattgggttatctactcttggtggaattgttggtgtttattgtagtggtataacagaaaaagatgataaagaggtaaaaaacgaatcaattccta

SEQ ID NO: 1424 - DNA, 260 bp, Artificial Sequence
  Description of Artificial Sequence: Synthetic polynucleotide
cagatagacaaattagagtcctactgcaaaattaaggactggacggtttacaaagtatacactgatggaggtttttcaggatctaatactgaaagaccagcgctagagaaccttattaaagacgctgacaagaaaaatttgatacagttctagtttataagctagaccgcctcagccgtagtcagaaagatacactattcttgattgaggatgtattcatcaagaatgggattgaatttctgagcttgcaagagaatttt

SEQ ID NO: 1425 - DNA, 158 bp, Artificial Sequence
  Description of Artificial Sequence: Synthetic polynucleotide
ccatgggaagtgaaatttatatacgacggattgtaatattaagtgcaacacctataaaaattcataaaaaatgcccataattggcactttgttgtaagatgttaataaccaaaaaaacacatacaaggagtgccaacatgagctataaccatcttaca

SEQ ID NO: 1426 - DNA, 260 bp, Artificial Sequence
  Description of Artificial Sequence: Synthetic polynucleotide
ttaaatgaattggtttaacaacaaagtctataagactaataatagatccgtcagataacttgtaatgcgtgtctctaatatcgccaacaagttgtacaatttctaaagttgaatttgtttctggatgacggattgtaatattaagtgcaacacctataaaaattcataaaaaatgcccataattggcactttgttgtaagatgttaataaccacaaaaacacatacaaggagtgccaacatgagctataaccatcttaca

SEQ ID NO: 1427 - DNA, 260 bp, Artificial Sequence
  Description of Artificial Sequence: Synthetic polynucleotide
tttggatgcagtccgcaggcaatgcgcaacattctcaacaaacaccgggagtccgcatgaacgttatcatccacgatcaagattttcttgactacccgatcatggtagtcgacaccgagcttctggagaacacgctggaccctgagaccacggcgttcgagcgcgcgcaggaggcgctggcgcgcaaggaggtggtgctactcgtcaagcccgagcacataggacgcgtgttgtccaaagtccacaaacatgtgacagcc

SEQ ID NO: 1428 - DNA, 260 bp, Artificial Sequence
  Description of Artificial Sequence: Synthetic polynucleotide
ggagaagatggaaaagctcgaagaaagagtaaaaagtatagttcgaagatactaaaatgataggagaaaatatatgagagataaatattctaagtctaatattaataatgtttcgggaaatatttttaatggaccaaccaatattgcggcaggtaataattattataaggaagctgaagaagataaggttgcatcatatacaccagaacctgtttggagaagtccgataacaatggcaatgctttcatggatgggattta

SEQ ID NO: 1429 - DNA, 260 bp, Artificial Sequence
  Description of Artificial Sequence: Synthetic polynucleotide
aatcattatcagaaaggagcaaagcatggcgaaaaagattgtcaccatagaagcagttaagcctgtttgtcatcaagtagattttttaaggaaaagaaaagtggcaggatatgccagagtttccacagaccatgatgaccaagcaagctcttatgaagcacaaatgtgttattatgaaaactacattcaaagtcgtcatgattgggagtttgtgaagatgtattcggatgaggggataagtggaacgaatacgaagaaac

SEQ ID NO: 1430 - DNA, 260 bp, Artificial Sequence
  Description of Artificial Sequence: Synthetic polynucleotide
cactataatacagtcttcagatgtctgaagagaaataatcttacaaagatctgttcttagcttgctcgcgccacgcgtggtttcttggtaaatagcgccaaaacaccattcacggcgaatcggctactttgatgtttatgagaaacgtcgatatatatcgcatatcgacgttttcccctggctatagtgtcgtcgtttttgccaagagactgactccggacgacttctttctgttcaaacatattgtcgtttgtgagcat

SEQ ID NO: 1431 - DNA, 260 bp, Artificial Sequence
  Description of Artificial Sequence: Synthetic polynucleotide
caagttgattggttcgaaaatgaaagtgacagaggcgcatatggaagcacaggagagtaaagacgtattagaagagattaaaagaatacttcgcaaagagtaaggagtagataaagtgaatattaaaaaagcgagaaaaaaaccagtagaaattgagtttatgcaatttaataatatagacaatgcgtatgatatttcacaatgggcagtaggaaaaattaaatataaggtatcacgtaagtttaatataggttatatgt

SEQ ID NO: 1432 - DNA, 260 bp, Artificial Sequence
  Description of Artificial Sequence: Synthetic polynucleotide
gcgggttcgataccgaaaaatgcgttagatgaaaggaaacgcgaccgctttgaaagttagagattcttttaagtttagaataaactaataaattgctatgattccgattttctatttcaacaaatcattttcgatgaatggggatatacactatgatttcatacaaagaattaaaacacaatataacgcccgtaagttttaacgaaatcgacttcgatattttggaacaacacctgaatattagaatcgatgattttacg

SEQ ID NO: 1433 - DNA, 260 bp, Artificial Sequence
  Description of Artificial Sequence: Synthetic polynucleotide
ctttggattccgataactaaagctaaaaaaataccagttaatctatctgataccttttaacgatatctcgataggacttaaaggcgaaatcgcggttcgcttcctgcaaggaactgaggtagatttatagagtaaagaaaggctgtgacgacagtgggaacccactgtggttacagccttttttgcgtttttgtggtagaatcaaattgtagaacaatttggaggtcataagatattagtcgactttatgattcgattga

SEQ ID NO: 1434 - DNA, 260 bp, Artificial Sequence
  Description of Artificial Sequence: Synthetic polynucleotide
caacaagagaaagcaagaagaagtttacacaacaagaaaaaggaggggcgtcatgactaaaaagattattacgatagaacctgcaaaaatcttacgatcatcagaactacccagtctaaagaaacggaaagttgcaggttatgcaagggtatcaaccgaccgtgatgaccaagcgtcttcatacgaatcacagatgaaatactatactgattatatcggtagccgttctgattgggaatttgtcaaaatgtattctgatg

SEQ ID NO: 1435 - DNA, 260 bp, Artificial Sequence
  Description of Artificial Sequence: Synthetic polynucleotide
ttgtggactggtatatggcaatcattaaagctgcacaaaataaaggctatgtatggcgatctaaaaaatggttttcaggtaaaaagcaaacgttcttctgtcatgattgtgggaataacttttctgcttaaaattatgaacttaacaaaaaataaaaaaagtcctccaagttttgttcgaggaggaggacttaatcacaaatgtatagcaagacacacaaaagatgtgatgttttactatgctcaattttaacacagaat

SEQ ID NO: 1436 - DNA, 260 bp, Artificial Sequence
  Description of Artificial Sequence: Synthetic polynucleotide
aaggccgacgccgagcccggggccggagtcggcgaccgcatgcacttccactgggcctaggggcagtagttcgtggtcttcgtcgacacgccctgctccgcgagcgcacttgcgatcgcggggtagtcggagtggtagtcggcgaacacgtaggacgtcccgtccgtcaggacctggaaaccaggatcgatgtagccctcgctgcaggcgcgtgccctgagagttgctgactctgaccagtccgacgagagcgaaaacga

SEQ ID NO: 1437 - DNA, 260 bp, Artificial Sequence
  Description of Artificial Sequence: Synthetic polynucleotide
aaggccgacgccgagcccggggccggagtcggcgaccgcatgcacttccactgggcctaggggcagtagttcgtggtcttcgtcgacacgccctgctcctcgagcgcacttgcgatcgcggggtagtcggagtggtagtcggcgaacacgtaggacgtcccgtccgtcaggacctggaaaccaggatcgatgtagccctcgctgcaggcgcgtgccctgagagttgctgactctgaccagtccgacgagagcgaaaacga

SEQ ID NO: 1438 - DNA, 260 bp, Artificial Sequence
  Description of Artificial Sequence: Synthetic polynucleotide
aaggctgacgcggaacccggggcgggcgtcggcgatcgcatgcatttccactgggcctagggggcgggtgcccagcgttgcccgccgtagccgtcggccgcgatgcatcgcatcggcgtgcctgaggcgtcctcgctgcgctcgccgacggccgggcacggccccgacaggaccactgggtcctgggtgggctcctcggtgtacgtaggcgccggctcggtgttcacttccagcgttggcatcagcccggtgcagttgaa

SEQ ID NO: 1439 - DNA, 260 bp, Artificial Sequence
  Description of Artificial Sequence: Synthetic polynucleotide
aaggccgacgccgagcccggggccggagtcggcgaccgcatgcacttccactgggcctaggggcagtagttcgtggtcttcgtcgacacgccctgctcctcgagcgcacttgcgatcgcggggtagtcggagtggtagtcggcgaacacgtaggacgtcccgtccgtcaggacctggaaaccgggatcgatgtagccctcgctgcaggcgcgtgccctgagagttgctgactctgaccagtccgacgagagcgaaaacga

SEQ ID NO: 1440 - DNA, 260 bp, Artificial Sequence
  Description of Artificial Sequence: Synthetic polynucleotide
aaagccgacgccgaacctaaggccggagtcggtgaccgcatgcacttccactgggcctaggggcagtagttcgtggtcttcgtcgacacgccctgctccttgagcgcacttgcgatcgcggggtagtcggagtggtagtcggcgaacacgtaggacgtcccgtccgtcaggacctggaaaccgggatcgatgtagccctcgctgcaggcgcgtgccctgagagttgctgactctgaccagtccgacgagagcgaaaacga

SEQ ID NO: 1441 - DNA, 260 bp, Artificial Sequence
  Description of Artificial Sequence: Synthetic polynucleotide
aaagccgacgccgaacccggagccggcgtcggcgaccggatgcacttccactgggcctaggggcagtagttcgtggtcttcgtcgacacgccctgctcctcgagcgcgctggcgatcgccgggtagtcggagtggtagtcggcgaacacgtacgaggtcccgtccgtcaggacctggaagccgggatcgatgtagccctcgctgcaggcgcgtgccctgagggttgctgactctgaccagtccgacgagagcgaaaacga

SEQ ID NO: 1442 - DNA, 260 bp, Artificial Sequence
  Description of Artificial Sequence: Synthetic polynucleotide
aaggccgacgccgagcccggggccggagtcggcgaccgcatgcacttccactgggcctagggacagtagttcgtggtcttcgtcgacacgccctgctcctcgagcgcacttgcgatcgcggggtagtcggagtggtagtcggcgaacacgtaggacgtcccgtccgtcaggacctggaaaccaggatcgatgtagccctcgctgcaggcgcgtgccctgagagttgctgactctgaccagtccgacgagagcgaaaacga

SEQ ID NO: 1443 - DNA, 260 bp, Artificial Sequence
  Description of Artificial Sequence: Synthetic polynucleotide
agtcaaaataacgcacgtcacgcaagcagtcagaataacacaaaccacctacatcaaacctcaaatcacagaatattcaaaacccacaaaaattaccatcgcacctatatcaccaccatcatcagtaggcctatacaaaatttcatacagaaaaaattgataataaacacatataataacaaaaatatatattaatccatatgacaaaccacaccaaatacacaacaaatccaattgacacaatatatgtctacacaagg

SEQ ID NO: 1444 - DNA, 260 bp, Artificial Sequence
  Description of Artificial Sequence: Synthetic polynucleotide
ttttaagcgtaatagtagcattaatttctagcccatttatagtttcgtttttaagtaagttatttaatataaagaattaaaaaaatcccacgctctcaaagtttggcgactctgagcatgggatcagaaaggatagtaaagaacctattttgtaggtctttttactatacccattttaacaaaaagtgaggtattagacaatgaataaagtagcaatttatgttagagtttcaactactaatcaagctgacgagggatac

SEQ ID NO: 1445 - DNA, 260 bp, Artificial Sequence
  Description of Artificial Sequence: Synthetic polynucleotide
cattcacgcgccaaagtcaggggatatttgggccgaaacatttacgggaattaaacttgaggacagtccatttgtcgaaaaagacaaagccaaacttgctaaaacccttgaaaaactagacgcggaaattcacgcgcacctagtgaatattaatcactggtctgtcactgagggcaatgaggaaggggaagacaaaaccaatggcaaaaaataaacaaacagccattgcttattaccgtgtcagcacggcaaagcagggc

SEQ ID NO: 1446 - DNA, 260 bp, Artificial Sequence
  Description of Artificial Sequence: Synthetic polynucleotide
atcaagcaagatggattagactataagaagaaaaataaatatacgacaataagtgcttaagggggatgattaatgttagttactgtatttcacgcgtctttacacaagatcgataagtttgaaatcccataccaaggattgcattttggttctttcgagtcagcacttcaagcagtagagaggaagtgtgagcaaaatggtaccgatgagttctacctacacagagtgttactagatatcactacttgcgaggatgtttt

SEQ ID NO: 1447 - DNA, 260 bp, Artificial Sequence
  Description of Artificial Sequence: Synthetic polynucleotide
ctcaacgagtcgactttgtatgactggatcaaccgccagaaagccaagggaaatctatgagtcgccgcaaggaggagtagttggaccgctgccaatccggcccatactgcgtggccgccacccccgacggcgcggccctcaccaccaagatcatatgccagaggtgcctcacaagactccaggaacaatacgacgagctccccaccatccggagagttctggagatgttcaaagggggattgtggggccagtccggcgaa

SEQ ID NO: 1448 - DNA, 260 bp, Artificial Sequence
  Description of Artificial Sequence: Synthetic polynucleotide
ctgaatgaatccactctctacgactggatcaaccgccagaagaaaaagggaaacctatgagcatctacttcgagatccccgaagggcaaatgatcgaaggcgtattcgaggtggggcccggcgccaacatccgggaattagcccccggtaagtatgcgatcctccccgacctcaacgccccctcggggggctggaccccattcaacgccgacggcgagattgactccgaacgcctcgcggccgagggctgggcggtcctc

SEQ ID NO: 1449 - DNA, 260 bp, Artificial Sequence
  Description of Artificial Sequence: Synthetic polynucleotide
ctcaacgagtcgactttgtatgactggatcaaccgccagaaagccaagggaaatctatgagcatctccatgcgtgctgtgaccgccgatggaatccttgaaaaagatgacaaggccgtcgagcccgaggtgttcaccttccctggcggggagcaccacctccgcaacatccctgatcatccgaatatcaaggcctgggtggcgtgtgtgcgggggagtgaccccaacgacttggtgaaggccggtctgctatccgatgtc

SEQ ID NO: 1450 - DNA, 260 bp, Artificial Sequence
  Description of Artificial Sequence: Synthetic polynucleotide
ctgaatgaatccactctctacgactggatcaaccgccagaagaaaaagggaaacctatgagcatctacttcgagatccccgaagggcaaatgatcgaaggcgtattcgaggtggggtccggcgccaacatccgggaattagcccccggtaagtatgcgatcctccccgaccccaacgcccccgcggggggctggaccccattcaacgccgacggcgagattgactccgaacgcctcgcggccgagggctgggcggtcctc

SEQ ID NO: 1451 - DNA, 260 bp, Artificial Sequence
  Description of Artificial Sequence: Synthetic polynucleotide
ctgaatgaatccactctttacgactggatcaaccgccagaagaaaaagggaaacctatgagcatctacttcgagatccccgagggcaaatgatcgaaggcgtattcgaggtggggcccggcgccaacatccgggaattagcccccggtaagtatgcgatcctccccgaccccaacgcccccgcggggggctggaccccattcaacgccgacggcgagattgactccgaacgcctcgcggccgagggctgggcggtcctcg

SEQ ID NO: 1452 - DNA, 260 bp, Artificial Sequence
  Description of Artificial Sequence: Synthetic polynucleotide
ctgaatgaatccactctttacgactggatcaaccgccagaaagcaaagggaaacctatgagcatctacttcgagatccccgaggggcaaatgatcgaaggcgtattcgaggtggggcccggtgccaacatccgggaattagcccccggtaagtatgcgatcctccccgaccccaacgcccccgcggggggctggaccccattcaacgccgacggcgagattgactccgaacgcctcgcggccgagggctgggcggtcccc

SEQ ID NO: 1453 - DNA, 260 bp, Artificial Sequence
  Description of Artificial Sequence: Synthetic polynucleotide
ctcaacgagtcgactttgtatgactggatcaaccgccagaaagccaagggaaatctatgagtcgccgcaagggggattagttggaccgctgccaatccggcccatactgcgtggccgccacccccgacggcgcggccctcaccaccaagatcatatgccagagatgcctcacaagactccaggaacaatacgacgagctccccaccatccggagagttctggagatgttcaaggggggattgtggggccagtccggcgaa

SEQ ID NO: 1454 - DNA, 260 bp, Artificial Sequence
  Description of Artificial Sequence: Synthetic polynucleotide
tgaaaaagttttttactggggtgatagaaaaatcactcaagcgactgctgaaaaacgttgtgggtatttcaaggggtaatgcttatgactactataactctcaaaacttttacattttacgctattaataataagtctttttataaattgttggatagcttgctatcaagtaatcagttgagagcaggcagtggattacaatgaaagtagctatatatgttagagtaagcactaccttgcaagctgaaattggctattcc

SEQ ID NO: 1455 - DNA, 260 bp, Artificial Sequence
  Description of Artificial Sequence: Synthetic polynucleotide
tcagaatcgatgaaaggaagaaagagtatagaggagagaataaagagccgttcggaataaacggctctttattctcaatcgatatagagaaactgtgagaacgtgaataaagagccgctcggaataaacggctctttattctcaatcgatatagagaaacgatgagaacgtgaataaacggctctttattcttaatcaatagaacaaaactataagagcagcgatcaaatctcagtctgagtaaaagggtcgctaattct

SEQ ID NO: 1456 - DNA, 260 bp, Artificial Sequence
  Description of Artificial Sequence: Synthetic polynucleotide
accaagatccaaaagatacatcaattaagtttgatgacaatccaataagaaattcagaaagagtgaatattgattttagttccgatagtgaacaataattaaaaaattgaattttgaatttatatagtggtccaattattattggaccatcagtattcctttatcgactataattgttcgttgtgtaaggaaattaatttatgaataacactaattattcaaaaaatgctggcacggcattagatgctggtatggcatta

SEQ ID NO: 1457 - DNA, 260 bp, Artificial Sequence
  Description of Artificial Sequence: Synthetic polynucleotide
aaatacaatggtttcggtcttattgcagaagtattttcacgatggtgtgaatggtcctaaaaaattgaatcagggtgaactcgaaaaatattttatagaggataatcatgaagctattatttccatggaggttggccaaacagtcaagacaaactagcagcaaaaaggtagaaacaaaacctataaatttacggggttattaaagtgtcagcattgtggttcgactttaaagagacaagtttcttacaagaaaaaaattg

SEQ ID NO: 1458 - DNA, 260 bp, Artificial Sequence
  Description of Artificial Sequence: Synthetic polynucleotide
tcggcatgtaaggcaagatgggcaacaattaaatatgattacccttacatcatgtattaaaaactttttataaaatttgtttacacttttgattatgtatgttataatttatatatattataaaggagtggttttatgggtacaaaattattggtttatgaattagaagatttacaagaagaaccatttggttttgaagttgaaaatctaacacctcgtgattggagagagatttcttcttatgttgaattatctgaaga

SEQ ID NO: 1459 - DNA, 60 bp, Artificial Sequence
  Description of Artificial Sequence: Synthetic oligonucleotide
atatcagaaagtggacagattactgtcgcctttctggaaggaacagaagtcgacctgtag

SEQ ID NO: 1460 - DNA, 260 bp, Artificial Sequence
  Description of Artificial Sequence: Synthetic polynucleotide
ttaaaaaacgaaaatacaaaggatctttactacttcaaaaatactttcatgatggtgtaaacggtccaaaaagattaaatcaaggacaggttgaacaatactatatcgaagataatcatgaaggaattgtatctaaggaaatatgggagaaggttcaggtaaaaataaaaagccgttctcggatccaaggtacaaataaaacctataaattttccagaatgttaaaatgccaatattgtggttcaacattaaaaagacaa

SEQ ID NO: 1461 - DNA, 260 bp, Artificial Sequence
  Description of Artificial Sequence: Synthetic polynucleotide
ctgaatgaatccactctctacgactggatcaaccgccagaaagcaaagggaaacctatgagcgcggagatattaaaagaagcccgggacatcgtcgccaaagggtggataaaaggcgactacacagacgatcaggggaactactgcgcactgggcgcgctaggggaagcggttatgcgcaatggccttttcccctatgttgtctgggagaccaggacgaggctccaggaccacttgccagatctcgggtggaagggacgg

SEQ ID NO: 1462 - DNA, 260 bp, Artificial Sequence
  Description of Artificial Sequence: Synthetic polynucleotide
ctcaacgagtcgactttgtatgactggatcaaccgccagaaagccaagggaaatctatgagtcgccgcaagggggattagttggaccgctgccaatccggcccatactgcgtggccgccacccccgacggcgcagccctcaccgccaagatcatatgccagagatgcctcacaagactccaggaacaatacgacgagctccccaccatccggagagttctggagatgttcaaggggggattgtggggccagtccggcgaa

SEQ ID NO: 1463 - DNA, 260 bp, Artificial Sequence
  Description of Artificial Sequence: Synthetic polynucleotide
cacggtgcgcccgccgacaccgcccgacccgacgtggaggattcctgtgcaaccgcatgacccccgaacccgacagagcatcgagcgctcgaccttcgcgcgcacgctgcgccagttcgtggcccggcagaccctgctgctggccaacaacgtgaccctgctggccgagatccgcgacgacatcgcggccggcgccgaggcggtgccgcgcatcaatctggcgatggccaagctgcacgagcgcatgcgcgcactcagcg

SEQ ID NO: 1464 - DNA, 260 bp, Artificial Sequence
  Description of Artificial Sequence: Synthetic polynucleotide
ctgaatgaatccactctctacgactggatcaaccgccagaaagcaaagggaaacctatgagcgcggagatattaaaagaagcccgggacatcgtcgccaaagggtggataaaaggcgactacacagacgatcaggggaactactgcgcactgggcgcgctaggggaagcggttatgcgcaatggccttttcccctatgttgtctgggagaccaggacgaggctccaggaccacttgccagatctcgggtggaaggggcgg

SEQ ID NO: 1465 - DNA, 260 bp, Artificial Sequence
  Description of Artificial Sequence: Synthetic polynucleotide
tttagaggaaaggaatggaatacttcgagagtaaaatatgtctccaaatcatctgtataattatattttttataaacataatacctcatatatgttttgcaaaaattttctaaattttataaacataatacctcatatatgttttgcaaaaattttctaaattttatagatcgctgttgaaacctcttgcaactaggaaatcgttttgatctttcttcatacacaaacaaccagcattttgccatccgttgtcacacata

SEQ ID NO: 1466 - DNA, 260 bp, Artificial Sequence
  Description of Artificial Sequence: Synthetic polynucleotide
gggaccatccatgcgtgggccactccgctgtcggccgccagctccgtgagggcggtgaacgacagggagaacgcgaggccgccaacgaacacggtgcctgcggtagccagcttgacgggagagagcatcggagcctttcgggggatgtgatgttcgaggagtagaacatcacttttaccaaactccggtatccttgtcatatgcgagttctgggaagattgcgtttgtcgaggtcaacggaggaatccacctccatcgag

SEQ ID NO: 1467 - DNA, 260 bp, Artificial Sequence
  Description of Artificial Sequence: Synthetic polynucleotide
aagccttggaatggtaggtcattagcgaccttctcgaaaaggaatggtattgaattgtaaaggagaaagaataatggatattaaactagaagattatttaacggaaggagaaatcaaagataccttacgtcaagcattacgtgacaagtgtgaaaactatgtagttcataacttcgagcgtatgatctcgaattcagcctaccattgtgtctggcaaagtgtagatgaagtcattgatggaacattcaagcagcaacttg

SEQ ID NO: 1468 - DNA, 260 bp, Artificial Sequence
  Description of Artificial Sequence: Synthetic polynucleotide
gaagtctatggagttaatattgttgagctccgggaaactttgagaggtgttcgtgtctgataagaaatcgaaagaactcaagaagctcaaaagtgccgccaagaaatattgtttggaacctaatgcctcggaattagtgttaaagaaaaccctgttttctttacctaaagtcattaaaatgttccgtgatgcaggtgagggaagtttgtatgattacatcactcatttaaaaatgctggaggcgaagaaactcttagatg

SEQ ID NO: 1469 - DNA, 260 bp, Artificial Sequence
  Description of Artificial Sequence: Synthetic polynucleotide
gttggttcggattatgaatacgacatcagaagacacttaatggctaactacggactgactcctgcggagatccgtaaacataaaggtccacttactcgtcgtaacaaaaccaagcagtttgttcgctttgttaaaactaacgccgacttatgtattagagaagacgatatccgtctgggtaaaataaaggaaactgaattatgtaccctgtagataaagaatccagaattcgtttaatggaagatctggacaaatggata

SEQ ID NO: 1470 - DNA, 260 bp, Artificial Sequence
  Description of Artificial Sequence: Synthetic polynucleotide
taagaggagctataatattcgttaagaacattgtatagtcatttttaatttcgacaatgttacgttcgtaaaaatgtgtcatcgttatataatcatccatgagagatttacaaattgaatttaaacgtaatagtgggggaaaaaaattgatattaatattcgtacaggtggattgttttgatgattaggagtataaatatatgagtcaattaggggcaatttattgtagaaaaagtagtgttgggaaatatgcgattaag

SEQ ID NO: 1471 - DNA, 260 bp, Artificial Sequence
  Description of Artificial Sequence: Synthetic polynucleotide
tctaagcttatcaagaagcatggtatcccttacaaaaagaaatcacgttggaataaataactacaggagtgatctatgtaccagaacataaataaaaatttcccagagatcacagaatcttttgaggtattgatgtcctacccaatcggtaagatcttcacctcagacacaccctctgggaaggagaagaaacttgagcagaggtgtactaaactggtagacagttattactctattgagagtatccgtcatcagcgtat

SEQ ID NO: 1472 - DNA, 260 bp, Artificial Sequence
  Description of Artificial Sequence: Synthetic polynucleotide
caatattataattgcacgccacgtgaatatgcaaaacatcagttattatctggaaaataagatgcatttatctcccagataatattgtaatattaaactcagtcagcatttagtagcagagcattatctatgatgatctgctcccattcttcgaatgcccgatcgcggacgccctggggaacactgttagttttgaaatcgacgaccgtacgccatttcccgtccggacggtacatgcgcagagctttacttcccccttc

SEQ ID NO: 1473 - DNA, 260 bp, Artificial Sequence
  Description of Artificial Sequence: Synthetic polynucleotide
cattacgtaaacaacaacgtgaagagttacaagagttgattgccaagaagcagaaggaagctaagtcagaaaaatctgttgaagagttacaagcagaactgttggcattagaggctggaaaataattaaaataaaacgttgacaccgatccccgatgtgctatgattcgtttatagcaaatacatcggggattttttattatgactatatatgcatataaaaggtgttcaacaaatgaagacaagcaagatactgctcgt

SEQ ID NO: 1474 - DNA, 260 bp, Artificial Sequence
  Description of Artificial Sequence: Synthetic polynucleotide
aaaggaaataaattttacccaatacaagtaagcaacttaatcaaattatatgaaaactaatatgaaagttaatatagagaatttaatcgataagagtcctagggagttgaacatccttaagaaagagtatttagataacatggatttcgtaagcgcttgcgaggtaaagagcttcgctaggcattgtacaaaaataaaaatgttggtgaaaagggggggtcaagaacaataaaataaaagggttatctttgtagtgtaac

SEQ ID NO: 1475 - DNA, 260 bp, Artificial Sequence
  Description of Artificial Sequence: Synthetic polynucleotide
aatagaaaaaaaatatccgacaagtttttagatacacgtaaaaacgcgattaaacaataattttttgtagggtttaaccctatatattaataatataatttcgtgaaattccatgaaaacccgtgaaattccatgaaacattttattataaactttataaactttataaagtctattaatcactactaaataatattaaagtctattaatcactactaaataatattaaagtctattaatcactactaaataatattaaa

SEQ ID NO: 1476 - DNA, 260 bp, Artificial Sequence
  Description of Artificial Sequence: Synthetic polynucleotide
tttaaacaacactaccgtacgcatcctcaatcgtacgcgaatgcattcaagagaaaatgaatatgactgaccacgaattagcactacaaatccaagactacgttaaagaaatctatatgaaacctcgtccatctaacttggtttacactaagttcaatatgagtggacctgtcatgggacgtttcttggaacgattaaatcatccttcaatcaaagtaatgttggtggaagcccgtatggagcgagcgaaagaactccta

SEQ ID NO: 1477 - DNA, 260 bp, Artificial Sequence
  Description of Artificial Sequence: Synthetic polynucleotide
gtatggaacgtattttcagcgtagcgaccagtggcaagcgcagttcgttctgtacttcttttaaacgtcatttcggcttgaccccgacagaagctcgcaaacatccagaacgtgtaatgcgtttaaaggacaccgagcaattcaaaaagtacatcgaagtcggagtcaaaaacatagaactacattaaaggtttattaccatgcaacaatcgttcagagaacaattatttcaagacaccttaaaatgggtcgataaaaac

SEQ ID NO: 1478 - DNA, 260 bp, Artificial Sequence
  Description of Artificial Sequence: Synthetic polynucleotide
ttttaacttactgtacactttgtcatctaatcttactacaaatgccttcattacaatcctttcattctctgcctaaatgcactctttctgggaaggaaaaaacgtgaaataaaaaaagtacatttaggtattgtaataatatcaaaaatatataatatgtatactaggcaatgttgcctattacaaaggagaaaagataaatgtggaaaataggagcaataagattgagtgacagtgcagcagaaaaagctaggcagatg

SEQ ID NO: 1479 - DNA, 260 bp, Artificial Sequence
  Description of Artificial Sequence: Synthetic polynucleotide
aaacgttttacggtaggtcctaaacactatcgtcaactaaaattaatcaaggctatataactggggtgtaatactatgtgggtaatgactagctgaccatctaaatgaagaattgaacaatcttggtgtataccgcaattgacgacataatttggaatctatcctcggcacccacatcaccctttcactaattgggtgtacaaaacgggtataaagcgcaaggccgtcattttacgatgacggcacttattatgttggaa

SEQ ID NO: 1480 - DNA, 260 bp, Artificial Sequence
  Description of Artificial Sequence: Synthetic polynucleotide
ttcaagtatggcaaattacattttaaaagagtcagaggaaaagttcagtgtaagtactgatagtgagcagttctacttggtcacagcactgattaacaccgttgctggcctaaaagaagaagatcaaccatcatatcgcaatattcaaaacattatccagcagataataacggaaaatctctatctagatggcactgtatgtgccttggttagctatggtcgggatcgaaatactaacaggaaaacctacgtcgtccatg

SEQ ID NO: 1481 - DNA, 260 bp, Artificial Sequence
  Description of Artificial Sequence: Synthetic polynucleotide
aaggtttgggatggtaaatccttagctgttttcgcaaaacgaaatgaaattaaattgtaaaggagaggtggacagatgacacattcacttagagaaggattatcaagaagtttgcaagacctaggatcacttgtagatgttaaagtattgtcagaggtacacagtccgatcctatatgtagaaattatagtattaagtacattgcaagatgatacgattgctagtattattgctaaacatctaccaattgttactcagac

SEQ ID NO: 1482 - DNA, 260 bp, Artificial Sequence
  Description of Artificial Sequence: Synthetic polynucleotide
ttttgaactaatattattatctctttggttcaacaccaaagtattggatagtattaagaggcaatggacatttgagaatgtcgctatggtttatattataagctgggtaattttcctagctggaaattattaaaataaatattgacattataaacccagtaaccttatattaagtcactgggtttttatatggagttaccatgaaagtagtattatacaggcgtttgagtaaagaagataaaaccaaaaaccaacatggt

SEQ ID NO: 1483 - DNA, 260 bp, Artificial Sequence
  Description of Artificial Sequence: Synthetic polynucleotide
ttgaactaatattattatctctgtggttcaacaccaaagtattggatagtattaagaggcaatggacatttgagaatgtcactatggtttatattataggttgggtaattttcctagctggaaattattaaaataaatattgacattataaacccagtgacttaatataaggttactgggttttcttatatggagttaccatgaaagtagtattatacagacgtttgagtaaagaagataaaaccaaaaaccaacatggt

SEQ ID NO: 1484 - DNA, 260 bp, Artificial Sequence
  Description of Artificial Sequence: Synthetic polynucleotide
aagtttgaaaggaaatacggaatgggtccccgacgttatcaacaacacgcacgtctttaagttatttcctaactcaacgtacattatatgtgagcggtacaagattaggtttaactagactagcgtgtccgaaaagaaaaggtgtatgccgcgagtccgacctaggaagttatcccttcattacaaccgctcacaactcttttggttcagaggaagtcctccttgtcaacatcgatgtcactaaagccattctctgaacc

SEQ ID NO: 1485 - DNA, 260 bp, Artificial Sequence
  Description of Artificial Sequence: Synthetic polynucleotide
ttacggtaaaacctatcgtgaatggagaaaggatactaggatgaaattagctaaggagttactccacaaaaatccaagtattaagattacagacttggcgactactgtaggttcttgtagtgcgacctatttacggaagcaataccaagaagtctacggggttaatatcgttgaactccgggaaactttgagaggcgcttgtgtctgataagaattccagagagttcaagaagctcaaaaatgcggctaagaaatattgt

SEQ ID NO: 1486 - DNA, 260 bp, Artificial Sequence
  Description of Artificial Sequence: Synthetic polynucleotide
ttatggtaaaccctatcgtgaatggagaaaggatactaggatgaaattagctaaggagttactccacaaaaatccaagtattaaaatcactgacctggcgactaccgtaggttcttgtagtgctacttatttacgtaagcaatatcaggaagtctatggagttaacattgtcgaacttcgggaaactctgagaggcgttcgtgtttgataagaaatccagagaacttaagaagctcaaagacgcggctaagaaatattgc

SEQ ID NO: 1487 - DNA, 260 bp, Artificial Sequence
  Description of Artificial Sequence: Synthetic polynucleotide
aatcctcttagacattaagtttaagaggatttatttttatgaaacaatacaaaattcgacctagtttctttggcttattctacaaagttactttgtttgctgataattatgaccgacatactatatcttttcatttaactaggcagtctgcggaaaatcaggtaaagtggctgaagaaaattaattattaaggttttattatgaaagtgattatttacaaacgtctttccaaggaagaccgtactaaaacacaacacggt

SEQ ID NO: 1488 - DNA, 260 bp, Artificial Sequence
  Description of Artificial Sequence: Synthetic polynucleotide
accaataaatcaaaatatatatcacgcgcatcaacggatgcttttccaaagcatggaaaaatacaagacagtgttttgttactattattttgcatataaaatgacaaacaaaaaatatatttacataagagcgcaaaaaaattgaaccattaaattcttatcaatataaatattatatttattcgagaatcttatataatatggtggcacttaatgacgaatcaaaaaatggatatatttattgtagacaaagcaaaaag

SEQ ID NO: 1489 - DNA, 260 bp, Artificial Sequence
  Description of Artificial Sequence: Synthetic polynucleotide
ttcgtgcgccgcggggacatgtcctcgcggctcctgcagcaccacatggagatggtgcgcgctcgtctcccgccgtacgacctggaggggctggtggtgtgctgcaacgtcgacggcggcgagcgggcgttcgcgctctcgccgcataactgaaaagatatcatcggaacgtgaaatcgcggccagaggccggcgcacccatgacggcggcgctcatttactgccggatctccaccgaccgccagacgacgctgctggcc

SEQ ID NO: 1490 - DNA, 260 bp, Artificial Sequence
  Description of Artificial Sequence: Synthetic polynucleotide
attttgattttagtggtggtcaatgattaaaaaattaattttgattttagtggtggtcaatgattaaaaaattaattttgattttagtggtggtcaataattaaaaaattgattttttaattaacatagcagttcattttagttgaaccataagtattcctcaatcaatcgtaattattgttgtgttggaaattcaacttatgaataacatttatcattcaaatgatactgatatagtattagcggctgatgcattggtt

SEQ ID NO: 1491 - DNA, 260 bp, Artificial Sequence
  Description of Artificial Sequence: Synthetic polynucleotide
cgcgcggacatgtcgacgcgcctgctgcagcagcacatggaccggttgcgcgcccaccccccgccgtacgacctggaggggctggtggtctgctgcaacagcggcggcggcgagaaggcgttcgcgatctcgccgcataactgaaaagatatcatcggaacctgaaatcgcggccagaggccggcgcacgccgcttccccatgacggcggcgctcatctactgccggatttccaccgaccgccagaccacgctgctggcc

SEQ ID NO: 1492 - DNA, 260 bp, Artificial Sequence
  Description of Artificial Sequence: Synthetic polynucleotide
tgtgatcgcaactcgaatcataaagattcgtccgacaaaatcacagaaacaacagattgacaagattgcaggagttgttcgattttgctataacgcatcgatcaatgaaataaacaaaatgcgttgtcatgaaatttcatggccatccgggaaactcgatcaacatctgagaaacaaattttcgatcgggaaacacaatgatatcgaacaatacatttcgattcatggaaataacatcgaacccgaacagatcatcgaga

SEQ ID NO: 1493 - DNA, 260 bp, Artificial Sequence
  Description of Artificial Sequence: Synthetic polynucleotide
tccgctcgtggtaaggtgttgagtcaaggtatgatcagtaaactcttaaaagaaatttagataaaattgaaaaaattattatcaggactacctagaggaaaacttagaacaagttctaaaatcgtatctgggatctgcttacgaaaattagtgcaaattacataatttattatccgagtaccaattacgattttcgtttttacgataagaatcaacaacttatactagttcaataatttatttatgagatttcgtttcca

SEQ ID NO: 1494 - DNA, 260 bp, Artificial Sequence
  Description of Artificial Sequence: Synthetic polynucleotide
aaatttcgtctctttaatttttcttcttttttcttcttctttttctgtctcctattaaggatttttttagaagacattctatatatgtataatatatattttttttttattttttatatttttttataagtaaaaataaaaatcatcaaaaaatataaaaaataatatatataaaactatattatatataccattctataatgaaaaaaaagaataataaaaacgctgataacgaggtaaataaaaagaaagaagtaggt

SEQ ID NO: 1495 - DNA, 260 bp, Artificial Sequence
  Description of Artificial Sequence: Synthetic polynucleotide
tgaacgaagcaaaaagaatgatgcttgttagttttattagaaacaaatggaaaaagagatacagacagtggataatttgtaaaagaatgcatcggtatgttgatcctgactgctccaaaattatcgcaggctatttgtaaataaaaaaattgataaatacattaacgaaacaataataatcaatacatagaaacaaactaatgaaagcatatatctattgtcgattgagtggacgtcgaggatcggttaattctcaaacc

SEQ ID NO: 1496 - DNA, 260 bp, Artificial Sequence
  Description of Artificial Sequence: Synthetic polynucleotide
ttgagttggtgcaataataaataattcatgttttcacttttatgatttttagcatggtgttgatcgctttgggcccgcgataaaccaaaccatacaaaatcgactcgtgggatgaagccgcagaatcgaagtgactttcgagctggttgcgtttaaatgctccattcttgtttgtccaaaatcgacctcaaatcgaccccatgtgtctcactatcatccacctccacatttcaatatggactctatcatcgagctgggat

SEQ ID NO: 1497 - DNA, 260 bp, Artificial Sequence
  Description of Artificial Sequence: Synthetic polynucleotide
tcagctcgtggtaaggcgttaagtcaaggtatgatcagtaaactgttaaaggagttgtagtaagctcttgaaggaaatttaaataaactgacggatttattatcagagttactttcaagaaaaattaggacgaattctaaaaatggtatatgaggtttgtttatggaaattagtgcaagttgtcggatttattatccaagtaacaaagcactttttcgttttcctgataagaatcaactacttagacgaacgatgatttt

SEQ ID NO: 1498 - DNA, 260 bp, Artificial Sequence
  Description of Artificial Sequence: Synthetic polynucleotide
tcggctcgtggtaaggtgttgagtcaaggtatgatcagtaaactcttaaaagagttgtagtaaactgttgaaagaaatttagctaaactgttaagattattatggaggtggtatgcaagtagtacagtatagtataaaacaatgtggcatagacaagttgacatgcagtaacaaagataccaaattcatggataaaggtttttacggaaaactgacaccgctttgtacacttaataacggaaaccaagatggtattctgt

SEQ ID NO: 1499 - DNA, 260 bp, Artificial Sequence
  Description of Artificial Sequence: Synthetic polynucleotide
tcagctcgtggtaaggtgttgagtcaaggtatgatcagtaaattactcaaggaaatttaggtaaaccgttaaaattattatcaagattacttccaagaaaaattagtgcaaattgaaaaaattacatatgagatttgtttatggaaattccagtgcaaattacgtaatttatttgagcgatccctttcgccaaatggaaaaattatttctgagattacgtttccaaaatttgtagagaattctaaaattatttatcagaa

SEQ ID NO: 1500 - DNA, 260 bp, Artificial Sequence
  Description of Artificial Sequence: Synthetic polynucleotide
tgccgagtatcacgagcgatgcgaggcatacgatcggctcgtctgtaccggcccgatcattcacggctcgatcatgccggcgacggctcacgagctgcgccttatcggccgcaatgcgcgcgccgtattgcgcgagctggccgagcgcgcggcaatgctcggctattcatcaaggcaactcacgaaggcgatacaagaaaatgcgtgatccactcgacaagggcacactcgatatcgtcaccggcggcatgcgcatcggc

SEQ ID NO: 1501 - DNA, 260 bp, Artificial Sequence
  Description of Artificial Sequence: Synthetic polynucleotide
caaatatggttccaaaataaacgttgtaaagacagaaaaaatttggaaaaaaataattagacatgatttggtattttaaattgtacaattaatttaattgtgcaatttaattctaatcttttatgagtatgtaattacatactcataaaaagattattatcatacagcatcattatcattaatgaaagtatattcagttgaatgtttagtccatttcattgtcgttgaatttgaataaacaatagtcgttttttcatgtt

SEQ ID NO: 1502 - DNA, 260 bp, Artificial Sequence
  Description of Artificial Sequence: Synthetic polynucleotide
ggtggtaaatgggatgctaaaactgtttctcgtttgtgtgccagactgaacattaaataggagaggatatgaaacaagaaaatgaatctgtagatcacttaatcatgctgtcagccctttttgccggatgggacgtattttttgaaaatttgttcaattcttctacagatggttccgattttatgcgccagtttaaacgacgaactgttgaggactatgctttctattcaggtcggattgaaaaaggttacgaagataca

SEQ ID NO: 1503 - DNA, 260 bp, Artificial Sequence
  Description of Artificial Sequence: Synthetic polynucleotide
gtgcatagagaaaccgtaggagcaataaagcgaggaatatcgtggaaacacgttaaataaaattatatattactaggaggaaaacatattatgtcattcgcagatttaatcaaacaagcaaaagcagaggtagaacaacaaacaggcggggataacagccgtacagtttacccgaaagctaagcacccgacattattctttggtaaagatacaccggaattactatttcaactattaccttcagctgacttaaacagcac

SEQ ID NO: 1504 - DNA, 260 bp, Artificial Sequence
  Description of Artificial Sequence: Synthetic polynucleotide
tggtatccttctactgtaaggaattatgtaaatagatgttcttctaatgttcatctgtaatagaaacaatatgtgtctaaaagataaactatacaaggtcatttagacaccaattaaaaaggagtaaagatgatacagttgattaaaaagtataaagagcaaattaagtttgctgccgagtgcataacatttcttttaatgttagttgcaatgtattttttcactatagttatgtgtgcgttgtcagataagtgtgctgc

SEQ ID NO: 1505 - DNA, 260 bp, Artificial Sequence
  Description of Artificial Sequence: Synthetic polynucleotide
tggtatccttctactgtaaggaattatgtaaatagatgttctgttaatgttcatctgtaatagaaacaatatgtgtctaaaagataaactatacaaggtcatttagacaccaattaaaaaggagtaaagatgatacagttgattaaaaagtataaagagcaaattaagtttgctgccgagtgcataacatttcttttgatgttagttgcaatgtattttttcactatagttatgtgtgcgttgtcagataagtgtgctgc

SEQ ID NO: 1506 - DNA, 260 bp, Artificial Sequence
  Description of Artificial Sequence: Synthetic polynucleotide
atgtttatgcggaatccgaagaacacgcaaaagctattggttccgtgcttctttctagaatagcaggtgaagaaattcctgtagaggctatctttgcagaagttgaccctagtattcaagaggatgatattaccactacttaactgttgactttaacattaaggtagtgcatacttcctgtaacagaacaggagggtattatgaagtttgtactatatcatcgactttctaagaagaaacaacaaggcaaccagtatggt

SEQ ID NO: 1507 - DNA, 260 bp, Artificial Sequence
  Description of Artificial Sequence: Synthetic polynucleotide
atgtttatgcggaatccgaagaacacgcaaaagctattggttcagtgcttctttctagaatagcaggtgaagaaattcctgtagaggctatctttgcagaagttgaccctggtattcaagaagatgatattaccactacttaactgttgactttaacatcgaggtagtgcatacttcctgtaacagaacaggagggtattatgaagtttgtactgtatcatcgactttctaagaagaaacaacaaggcaaccagtatggt

SEQ ID NO: 1508 - DNA, 260 bp, Artificial Sequence
  Description of Artificial Sequence: Synthetic polynucleotide
tgctatttatacccaatatatggtaaaatataaaagagaattaacttttgttatatctaactagttagaataatataacataatatcatataatttaccaaaaaatattgaaaatgtggacaaggagtgataaactataaataaaaacattgacaaacatagacaatagtggtaatatgtatacataaggagttgaaattatgaatacatataaaccaaaagattttgcagaaatgataggagtatcagtaaaaacacta

SEQ ID NO: 1509 - DNA, 260 bp, Artificial Sequence
  Description of Artificial Sequence: Synthetic polynucleotide
ctgttgttgcgattgaaaaagacaaacttgtgggcgtttatcattcagcctgcgaggctggcagaagaaatggaatatgtgtacagaatatagttagctgttgttccggaaagcgtaaacatgctggtgggtatcaatggttttgggaaaacgataatacttggtgtgatttagttaacatggagaaataaatatatattatgatttacggatacattagagtaagtagtgataaacaaactgtagaaaaccaacgtttc

SEQ ID NO: 1510 - DNA, 260 bp, Artificial Sequence
  Description of Artificial Sequence: Synthetic polynucleotide
ctcttagatgaaatgcaagaagtaataactaacaatgtcagctatctcaatcacgcataaaatcgctttaaagcctaataacaagcatactacctactttaaaaaagcttttgggtgtgctaggttcgcttataattgggggttagctaaatggaaagaaaactaccaactaggtattaaaactagccatctacaacttaaaaaagagtttaacgctcttaaaaaatcgcaatttaatttcgtttatgaagtaactaaat

SEQ ID NO: 1511 - DNA, 260 bp, Artificial Sequence
  Description of Artificial Sequence: Synthetic polynucleotide
ctcttagatgaaatgcaagaagtaataactaacaatgtcagctatctcaatcacgcataaaatagctttaaagcctaacaacaagcatatcacttattttaaaaaagcttttgggtgcgctaggttagcttataattggggattagccaaatggaaagaaaactatcaactaggcattagaactaaccatctacagcttaaaaaagaatttaacgctcttaaaaaatcgcaatttaatttcgtttatgaagtaactaaat

SEQ ID NO: 1512 - DNA, 260 bp, Artificial Sequence
  Description of Artificial Sequence: Synthetic polynucleotide
tataaggacagatcttggtaccctacaacagttaaaaatgtccttgaaaggggttgctaatgaacagaatatggactaaatatataaacaagatgaacataaaagaaacattattgtttatagcagagggtgtagctttcttgttatgcttggctgctatctattttattgtcatgtttggatgcgtgatggttgatagttgttactattactatgttccaggagggggatcttgatgggagatagtggtagaaaaacat

SEQ ID NO: 1513 - DNA, 260 bp, Artificial Sequence
  Description of Artificial Sequence: Synthetic polynucleotide
ctgcacgagcaccagcgcggccacgtcgtcgacatcgaggagggcgcgctcgatgcgtagcccggaggacgtgcaccgcgagctattgcagtcgcgaggtctcgttccgctgacgctgttcgacccgcacaacctcgatgactgctacgagcccaccggtctcgacgagtttcaccccaacaccacgaggaacccctgatgctgcccgattgcgcgctgtgcggctgcccgcaccacgtaggccaatgcgcctgcacctg

SEQ ID NO: 1514 - DNA, 260 bp, Artificial Sequence
  Description of Artificial Sequence: Synthetic polynucleotide
ccttgttttttacaaaaacacgtaatgtaactcgcgccatacacaaatgtcagacagaaccagacaaacagacagaaacagaaggctaggaactgttcaacaaatccctgaggatacctgagggtttcttaagagacctgagtttttacggacaatttgatgctcgtaaaaattacataattttaatacttcgtagcactatggatggttacatctccggctcaaaagtcaaagaactcctcaacgtcagcgactggacg

SEQ ID NO: 1515 - DNA, 66 bp, Artificial Sequence
  Description of Artificial Sequence: Synthetic oligonucleotide
aatacaattagctatatggcaggctatattgttaatgatgggataaagcaagaagcataagactaa

SEQ ID NO: 1516 - DNA, 260 bp, Artificial Sequence
  Description of Artificial Sequence: Synthetic polynucleotide
agtcgcaaaaataagaaacttttagataacgtagctaaagctgtgcaagaatcttcctaaatatgttgacatggggtagatttgggtatatatttaagaagtcaccaaaacattgtgaggtcgaaacagtgctgctttcctttaaaacaagtctaatcccaaataaaaaacaggtaactgcttttcgtaaagcctctggtgttgctagacacgcctataactgggctaacgctcaaatacaagatgctctagctaataaa

SEQ ID NO: 1517 - DNA, 260 bp, Artificial Sequence
  Description of Artificial Sequence: Synthetic polynucleotide
aaagatgctgaagaaagtattcaaaaaagcaaaagaagaaatataaatagatataaatagctataaatagatataaagaaaggagtttagaatgttatctagaaagataagaattgatagctttatctctgataaagaaaaagaagaaatttatcaatattctaaatctctttctactatctataatgaatgtctagatctccttaaagagaatttgaattttaaagatctatctaaaatcacaaaaggtagatcgaaag

SEQ ID NO: 1518 - DNA, 260 bp, Artificial Sequence
  Description of Artificial Sequence: Synthetic polynucleotide
atctctagagatgtagatattcctagtagtactctacatgatttacttaagaatctctaagtagagtccccaccataagtaagacactatttctaaagttttaattattaatttttctctttgttgaaactctatttagaggataactattaactatttacagttgttctctctagagtttagcgctatttttaggagggaagtttttgtcttaaactcaagacagactccaccccgaggaacagctaacgacctcacga

SEQ ID NO: 1519 - DNA, 260 bp, Artificial Sequence
  Description of Artificial Sequence: Synthetic polynucleotide
ttgtgattggtatataaaaaaatatttttctgaaccgggacaaataaattttaaggcaatattttcaaaacatgatgtaaaatgttctaaatgtgaacatatagaacatgttgatggtatttttgaaggtattttatatgaagatataaaaaaaattgcggaaattaatgaaaagaaaaaatcaaggcgaaataataaatatgattaatttaaattttcttggaggaaaacaaactgcgaaattacttggtgttcatcaa

SEQ ID NO: 1520 - DNA, 260 bp, Artificial Sequence
  Description of Artificial Sequence: Synthetic polynucleotide
agaagtcacaaaaacaagaaaattatagaggagttgaaagaagttgctgttcggctttaaaactgagttaaaaatcaataaccatcagcgtacccaactacttcaacattgtggtgttgctcgtcatgcttggaattggggattagctcttaccaaacagatattagatcacaataagttaaatcctaattccaaaataaaatttcctactgctattgatttacataaatggttagtagcattagtaaaaagtgaaaatc

SEQ ID NO: 1521 - DNA, 260 bp, Artificial Sequence
  Description of Artificial Sequence: Synthetic polynucleotide
agaagtcacaaaaacaagaaaattatagaggagttgaaagaagttgctgatcggctttaaaactgagttaaaaatcaataaccatcagcgtacccaactacttcaacattgtggtgttgctcgtcatgcttggaattggggattagctcttaccaaacagatattagatcacaataagttaaatcctaattccaaaataaaatttcctactgctattgatttacataaatggttagtagcattagtaaaaagtgaaaatc

SEQ ID NO: 1522 - DNA, 60 bp, Artificial Sequence
  Description of Artificial Sequence: Synthetic oligonucleotide
agattgtgtaacatgagtcgtacaactatatataagtatattaaattgttagaggactag

SEQ ID NO: 1523 - DNA, 260 bp, Artificial Sequence
  Description of Artificial Sequence: Synthetic polynucleotide
aatgtttttactgcaaagatgaatggactaagaaaatataaaaaatctaaatatttataaaaagcttatgttaatgttatttttataaagaaatataaattttttattaactagttgtttcccatatcatttttatattatcattaatttataaatatttcaatattttataaattatctaatttattttaattatgaaaattgagatagttaagaatataatatgtcatattgcaggaattgacaaagaattacatcaa

SEQ ID NO: 1524 - DNA, 260 bp, Artificial Sequence
  Description of Artificial Sequence: Synthetic polynucleotide
ctgttgaaaaaactatccgagatattcttatggaacgggccaggggtaagtgacataacttatatcgagcatcttgccattaactggcaatatgtattaatgcttaagatcaaacttagttattatagggttaaatacagaaaccaaaaacctaactaatactattcaaaattactcatgacttatgctataatcgttctatgagtaagttgaccatatcagaagcggctaaattaaaaggtgtaagcgtatcgacatta

SEQ ID NO: 1525 - DNA, 260 bp, Artificial Sequence
  Description of Artificial Sequence: Synthetic polynucleotide
acgttgggggtttcgcgtgcgacgctgtaccggaccctcgccgaggacggcagcaagtgaccggcagccagttctgcgaccagttggttgccgagctgcgggcgcgtagctggcggatagggtgattggcatgggcgtcccaacacacgtgatggtgttttccagcggcaccgcatcgacgaagggtggcggttctagtcggttgcagttcgtcagtccgctacgccggttgaatggtggagagcgctggttcttgctgt

SEQ ID NO: 1526 - DNA, 260 bp, Artificial Sequence
  Description of Artificial Sequence: Synthetic polynucleotide
ttgagaaaatataaaacattaataaagaaagaaataatggataaacaacctaaaaaatgaccatataacagaatatatcaataattctttccgaaggtacgaaattatataactcgtttaagatcaataagaataagaaaatattaacatagcttcgcagttgggatattgcttatggttgtatttggaaaaccgaagcaataaaagagttaaatgaaatatagtattataaattatgttgttagtgttagactatgatg

SEQ ID NO: 1527 - DNA, 260 bp, Artificial Sequence
  Description of Artificial Sequence: Synthetic polynucleotide
aagaaaaataccgcatctcttttgagatgaagatatagtctacgctcatatgaaagtatgagaggtctactcgtgagagaaagactgctataggtgttgcgacttatagtgaataagaaaaatatatacaaatataaaaaaatattgacatatctctctaaaaagtgtaatatataattatactaaagggaggtgagtacatggaattaatgtccattggtaaatttgctaaacgtgtaggcgttaatgttgttactctg

SEQ ID NO: 1528 - DNA, 260 bp, Artificial Sequence
  Description of Artificial Sequence: Synthetic polynucleotide
gcgccggatgggacatggcgcgacgaggaatacatcaggagacgagagcgtgaacagtaatgctgcataccgtagccgatcttctcggggcgctgtccatcgtcatttttgtggccacgcttttcgcaatcgttagactgattgtgaaagctcgtgagggtcacaagtaagacgcttctttctcactcaggcgtaatagcctctatgcgcaaccatgactgtccccacggggcctttacacacacgcgcccacgatctga

SEQ ID NO: 1529 - DNA, 260 bp, Artificial Sequence
  Description of Artificial Sequence: Synthetic polynucleotide
gccgcctacatgcgcacgatcaccgatatcgcgcgaccgagggattctcgagcgacctgatgcgcaatcagacgatctgaccggaagaagcaagccccgcagtcgtttccaacgtgcggggcttttttagggcgccgatagggcgcagcagcatcactcagaaagaatccagcttaggctttcatggcggtctccggtgacggttgatcaggcgttcacacgatgaaccgccattgtacatcacgaccgccagtcagaga

SEQ ID NO: 1530 - DNA, 260 bp, Artificial Sequence
  Description of Artificial Sequence: Synthetic polynucleotide
acaacaggattgaaaaagcacaagcaagcattaatagatgaattaaccaataaaaaatgataatgctaacgcaatgcataattcgcaaaaaagaattccaattttcatgtcacattgaatttttagaattttttgaatttgcccctattttcgtttttttaaacgctcaaagctatttacaaataatgaacgataaatacgataataacagttgcaagacgtcaataatagatgcaacacaataatattttttacaacaa

SEQ ID NO: 1531 - DNA, 260 bp, Artificial Sequence
  Description of Artificial Sequence: Synthetic polynucleotide
cgtaagtacaaaaaaaaattaactgatacaattaaaaatggtaagaataatataaaataaatgatagtatctcgttatattgaatatataacgaaatataacagtttttggttgccgctctactataaactaaaaagtaaatatatcatgtattaaatcaatttgactagctataaataataaatagttattctatatgcaatataattaaacaataatttcatttgatattttgttatactaaaatcaaataatgataa

SEQ ID NO: 1532 - DNA, 260 bp, Artificial Sequence
  Description of Artificial Sequence: Synthetic polynucleotide
aatagacgtaaaagaaaactgcatattgttaataaagatcttgaattatttgatgaataaatacacttaaagatttgtttattatatatatttatataatgagctcttcagtaaaacttaaaaccattacatttaatataacagataagcatacacgaaaaatatttaatggaatgacaaaaatatcaaaaaacatatacaatacgactatttttaatattactatatttaacaaatataaacaaactatttttaaaaaa

SEQ ID NO: 1533 - DNA, 88 bp, Artificial Sequence
  Description of Artificial Sequence: Synthetic oligonucleotide
agaatgacagggattagtaagagtacattacaaagagcaaagcgaaaacaagaagactaggtacttagtctttttttattgaaaggag

SEQ ID NO: 1534 - DNA, 260 bp, Artificial Sequence
  Description of Artificial Sequence: Synthetic polynucleotide
ttgcaaataatgaatgtatttacagcaaaaatgaatggaatgagaaaatataaatcataaacaacaaaattattttccaaaaacttcaaacgaattgtaaaaatttataattataaacttttataaatattttgtgtactagtatcaccccagtcgggtttgttcgcgataatattaataagttgtgccattaatttttttattaataatcaatttataccaaaaccaatgttagtgaatttaattcaattttaaatttt

SEQ ID NO: 1535 - DNA, 260 bp, Artificial Sequence
  Description of Artificial Sequence: Synthetic polynucleotide
caccccgcgaaacgaacgcatatagaaaacgacgatcgaatcaatcaaatcgatcggtaatacagatcgattatgtctcaataaccacactcaacccatgatgttttttaagatagtggcgaattgatgcaaaggaggtgagatgaaatcaattcgctgtaaaaactgcaacaaactgttatttaaggcggattcctttgatcacattgaaatcaggtgtccgcgttgcaaacgtcacatcataatgctgaatgcctgcg

SEQ ID NO: 1536 - DNA, 260 bp, Artificial Sequence
  Description of Artificial Sequence: Synthetic polynucleotide
ctgcacgagcaccagcgggggcacgtcgtcgacgtcgaggagggcgcgctcgatgcgtagcccggaggacgtgcaccgcgagctattgcagtcgcgaggtctcgttccgctgacgctgttcgacccgcacaacctcgatgactgctacgagcccaccggtctcgacgagtttcaccccaacaccacgaggaacccctgatgctgcccgattgcgcgctgtgcggctgcccgcaccacgtaggccaatgcgcctgcacctg

SEQ ID NO: 1537 - DNA, 260 bp, Artificial Sequence
  Description of Artificial Sequence: Synthetic polynucleotide
ttcccctcatcagcgacaaagaataaattgtgtcatcccttaaccaaccgggacaaatagcctgacatctccggcacaactgaaaataccactcacccattaaccacggagttaaacggatgagtgactatcatcacggcgtgcaggtgctggagattaacgacggcacccgcgtcatttccaccgtatccactgccattgtcggcatggtctgcacggccagcgatgcggatgcggaaaccttccccctcaataaacct

SEQ ID NO: 1538 - DNA, 260 bp, Artificial Sequence
  Description of Artificial Sequence: Synthetic polynucleotide
tgttccttccaatacttcgtgacgttatttaaacaacaattccgtacacatcctcaaacgtacgccaattcttttaagagtaagtagttatggatacccaagaaaccattttaaaaatcgaagccgcagtcaaagaactatttgcagaaagcaaagcctccgctaagatttacgcacggctcaatatgagtgggccaagcatgggacgtttcctagagaaacataaccacccatcggttaaggagatgttagtagaagct

SEQ ID NO: 1539 - DNA, 260 bp, Artificial Sequence
  Description of Artificial Sequence: Synthetic polynucleotide
cgatcaaagacaaggacctgcgcgacagaatcggcaacgccgtttcttttagccgtccgctcagggccatgaacaaggtgttcagcccggcacgctgaacgctgccctagcggatgctagggagggttcaaaaaggaccctctccgccatacgctagggcaacgtacaatccccggaaacaaacgtttccacgggggaatatgctgtacggctacgcccgggtctcgacgcaagaacaagagacccacgctcaaaccgac

SEQ ID NO: 1540 - DNA, 260 bp, Artificial Sequence
  Description of Artificial Sequence: Synthetic polynucleotide
gcaaaagacccggagcaaaaaagcttctggcagcggtacaccaatgtttttctgaagcagcttagggccatgagccagacggcaaggatggcctcctaacccgttgccctaagcacgggagggggttcaaaaaggaccctctccgccattgcttagggcaacccgtacaatccctgaaaacaacaatcttcagggggcctatgttgtacggttacgcccgtgtctcaacgcaagaacaagagacgcacgcacaaaccgac

SEQ ID NO: 1541 - DNA, 260 bp, Artificial Sequence
  Description of Artificial Sequence: Synthetic polynucleotide
agccgaagaggcgcgccgcatgggcatctacgagaacgtgaagaaggtttttcggaacctgcttagggccaagaaacagacggtccggatggcatcctgacccgtcgccctaagcacgggaggagttcgaaaaggaccctctccgccattgcttagggcagccagtacaatcccaagaaaaaacgttttcgaggggttgcatgctatacggctatgcccgggtctctacgcaggaacaagagacccacgcacaaaccgac

SEQ ID NO: 1542 - DNA, 260 bp, Artificial Sequence
  Description of Artificial Sequence: Synthetic polynucleotide
cgagtttatggattaagaaaatataagaaaaaggttggtgatgattttaaatgcaaataacctataaagttgaattaaaactaaataagactcaaaagcaacagattaattcttatatcggtgttagtcgttgggtttataataagtttcttgaaataaatagtaaaaactaccaagaaacgcatgattccaaatcctatatgagtgcttatactttttctacttggtttaataatcagtatttaaaggataatcctagt

SEQ ID NO: 1543 - DNA, 260 bp, Artificial Sequence
  Description of Artificial Sequence: Synthetic polynucleotide
cgttaccaccccgcaggagaatcaagcggaacaatagagaagagtcagaaaacaaaataaccgctaatctgaccattagcggtttttgtgttaaatcagaacagccctttaactgaactggccgcgctgttaagggatgatgtcaccttatctttgaagccggacagcatatcgctgaacgatgaggattgcaggcgctcccgcaaatcctcatcacagcgttcaagggtcagtgaaaattctatctttttcgccttacc

SEQ ID NO: 1544 - DNA, 260 bp, Artificial Sequence
  Description of Artificial Sequence: Synthetic polynucleotide
actttgtatcgtattatcaacgtaaccactgaggatcatcatggcaacgcttgtttttgatacccatgcttttgttaaaaaactgaccaccgcaggaatgccggaagctcaggcggaaatcctcgcgcaggaacaggccaatctgatagaaaaccgcttggctaccaaggttgatatcacgacgttggaaaaaaatattgagatgaaatttgaagcgaaaatagaaagcgttaaatccgacatcatcaaatgggttgccg

SEQ ID NO: 1545 - DNA, 260 bp, Artificial Sequence
  Description of Artificial Sequence: Synthetic polynucleotide
cactaaaacaaaccattgacgaatgataattaggatttttttgatattctctaatatcaaaccacgattcagtttcaatttcattataatgatcggataattttggtatccatttttcttttttcttttttttcatattattttatttatattattaaaactttatataaacatttataaatatataaaaaatataacaaatgagtaaatacgtttcaggtaaaaaagcaagtgaaatattaaaagtgcatcaaagaaca

SEQ ID NO: 1546 - DNA, 260 bp, Artificial Sequence
  Description of Artificial Sequence: Synthetic polynucleotide
tagttaaaaaagagctacctacgagcataattctagaaaaattgttctgacttcttactctagaggggacgaaggtttgtagtttgttatcacaactgtgatttcagaaaagaggctccatgcacttcagatcgaagccgttgttagcagtttcagataaaccgtaaagtttatattatttcgtcataaaatttcatacaatgctaagacctaaagaagtgtgccaaagactaggaatttcatacgcaacactcagagaa

SEQ ID NO: 1547 - DNA, 260 bp, Artificial Sequence
  Description of Artificial Sequence: Synthetic polynucleotide
tatggaaaggctaaggcgtgtgtccaacacgtaagttacatgcaccctctcttactaggggtgccgggggttaaggtaccctatggggtaccgatgtacccccatgggtgccggggtcagcccggcactttggacagccgtcgtcaacagtttccgataaaccgtgaagtttatatactttgtatgtaagtttaactacaatgctgaaacctaaggaagtgtgccaaaaactaggaatatcataccgcacactacagagc

SEQ ID NO: 1548 - DNA, 260 bp, Artificial Sequence
  Description of Artificial Sequence: Synthetic polynucleotide
ctgtataaaaaacaccccgcgaaacgagcgcatatagaaaacgacgatcgaatcaattaaatcgatcggtaatacagatcgattatgccccaataaccacactcaacccatgatgttttttaagatagtggcgaattgatgcaaaggaggtgagatgaaatcaattcgctgtaaaaactgcaacaaactgttatttaaggcggattcctttgatcacattgaaatcaggtgtccgcgttgcaaacgtcacatcataatgc

SEQ ID NO: 1549 - DNA, 260 bp, Artificial Sequence
  Description of Artificial Sequence: Synthetic polynucleotide
ttgtataaaaaacaccccgccaaacgaacgtgcatagaaagtaacgctcaaaccaattgaatcggtcggcaacacagattgattgtgccccaatagccacactcaacccacgatgtttttttcgatagtggcgaattgatgtaaaggaggtgagatgaaatcaattcgctgtaagacctcattttccaacatcacaaccaagtaacgctgctgcccgcaaaatgatctaacgcccatacgaccagggtgtcacctctgga

SEQ ID NO: 1550 - DNA, 260 bp, Artificial Sequence
  Description of Artificial Sequence: Synthetic polynucleotide
taaaacaaaatcagtaaagttttccaagaaagtgaaggataaacttaaaaatatacatattaacgtaacacaagaacaaatacatacactcaatggaattaaaatataataaattaaattaagccgcctgtctaggtggttttcttttgtatttagggtataatataaatatatattatgaataggggttgaattataaaatgagtgataaaagtaaaagaacatttaatcgttggacttcttcagaagaagaactactt

SEQ ID NO: 1551 - DNA, 260 bp, Artificial Sequence
  Description of Artificial Sequence: Synthetic polynucleotide
aataagcagccagaatggtataaaaattcaataatcgttattatttatttggtggagcttactcttagagctgcttttaagttgtttataaatgtaagtgctaattttcaaagattggataatcatacatttacaatatgtaattataaatgataatatgtaattgtcaattaccatcatttaattaaggagatttttatatgccacatcaaattttgacatccgaaaaaattgttcaggccggcgtgaacataatcgaa

SEQ ID NO: 1552 - DNA, 260 bp, Artificial Sequence
  Description of Artificial Sequence: Synthetic polynucleotide
gtttatgattaacagctaaactaggtttccaaagtaaatcagaaaccttttcacattcgtcattccaaaacttaccatttgtagttttggccattacattattactaatattatgaaattatcttatatttaagtaactttttgactattatattaattgaacatatttaaagatatgtttcgaaaatatatttatcagaatgcctaaatatgttcgtcgtaaagaagtactggaagtattaaaagttcattatcaaact

SEQ ID NO: 1553 - DNA, 260 bp, Artificial Sequence
  Description of Artificial Sequence: Synthetic polynucleotide
gtttatgattgacaattagattaggtttccaaagtaaatcagaaaccttttcacattcatcattccaaaacttaccatttgtagttttggccattacattattactaatctcataaaattatcatatatttaagtaactttttgactattatattaattgaacatatttaaagatatgtttagaaaatatctttatcagaatgcctaaatatgttcgccgtaaggaagtacttgaagtgttaaaagttcattaccaaact

SEQ ID NO: 1554 - DNA, 260 bp, Artificial Sequence
  Description of Artificial Sequence: Synthetic polynucleotide
aatgtctatgtagccaaaataaatggaaaaataagtggtaaattaaaagcgaaaaagtaattacattaacaataaaatatatgaaaatacatacattttcatatattttaacgaaccgtcaataaagcatagtcataaattatctgataattatagaatgatttaatgattattacgtacaaactactgaggaattatttactagaccaagaaaaatatcacattacagtgaaaaataattatttagtcatatcagttcc

SEQ ID NO: 1555 - DNA, 260 bp, Artificial Sequence
  Description of Artificial Sequence: Synthetic polynucleotide
attgcgcaaaatgaagaattatttaagatgttacaaaaagagaaagggactaatagctaatattagtcctttttttatataaattggttattatgtaaaaaattgacaataatgtggatgagttttttaactattttgttaatttattatataatacatgtatacgcaaaggggtaaaaactacgaacgtagtataaattaatgtagggggagtttcgtttgtctaaaagatggacagcagaagaagataaattgttagc

SEQ ID NO: 1556 - DNA, 260 bp, Artificial Sequence
  Description of Artificial Sequence: Synthetic polynucleotide
gtttatgattgacaattagattaggtttccaaagtaaatcagaaatcttttcacattcatcattccaaaacttaccatttgtagttttggccattacattattactaatctcataaaattatcatgtatttaagtaactttttgactattatattaattgaacatatttaaagatatgtttataaaatatctttatcagaatgcctaaatatgttcgccgtaaggaagtacttgaagtgttaaaagttcattaccaaact

SEQ ID NO: 1557 - DNA, 260 bp, Artificial Sequence
  Description of Artificial Sequence: Synthetic polynucleotide
aatgtatatgtagccaaaataaatggaaaaataagtggtaaattaaaagcaaaaaagtaattacattaataataaaatatatgaaaatacatacattttcatatattttaacgaaccgccggtaaaagatcaaaatgacatctatcaataaatttttggacaccatatctatgtaacatgtataatacagtatcgatatcaccaattcttacgaaacacaaaatacaatcacaattaatttcagcgccattgtctattag

SEQ ID NO: 1558 - DNA, 260 bp, Artificial Sequence
  Description of Artificial Sequence: Synthetic polynucleotide
gatgtaatgaatgtatttacagcgagaagaaatggatcgagaaaatacagtaacaaatagtgagtaatttctttatgaatttataggtaaatttataaagaaatataaagaaattagtaactagtagagttccctctgtttcatagtttataatactgttttcatgttttagttcatcgatagctgtagatccaaccatatctttttgataaagatctacaccgtttgcaatcaaatctttaaatatgtcgagacattca

SEQ ID NO: 1559 - DNA, 260 bp, Artificial Sequence
  Description of Artificial Sequence: Synthetic polynucleotide
gatgtaatgaatgtatttatagcgagaagaaatggactaaaaaaatacagtaacaaatagtaagtaatttctttatgaatttataggtaaatttataaggaaatataaagaaattagtaactagtagacttcccaatattcactaattgttttattacccagactcaataaatactgtaaaatttcgatgttttttgattcaacaataagtttatctaaatcgtaatcaatatcgtaattttctatcaagtacttgacta

SEQ ID NO: 1560 - DNA, 60 bp, Artificial Sequence
  Description of Artificial Sequence: Synthetic oligonucleotide
aaaatgacagggattagtaagagtacattgcaaagagcaaagcgaaaacaagaagactag

SEQ ID NO: 1561 - DNA, 260 bp, Artificial Sequence
  Description of Artificial Sequence: Synthetic polynucleotide
caaataatgaatgtatatgttgcaaaaataaatggaagaagaaaatataaaaataaataaaaatatatataaatcatacatttacatatattttatgagtccgtaaattatattaaaaatttaagaccaagtacatttcgtaaaaataatccaatgtttgaatcattaatattttttgataggaataatcattttaaataatatcattctattttttcaatatagttccaataataaggaaacatatgtttatacagttt

SEQ ID NO: 1562 - DNA, 260 bp, Artificial Sequence
  Description of Artificial Sequence: Synthetic polynucleotide
gcccgcgagttcaacatcagccgggaaaccctctaccagtacctccgcacggacgactgacacatgccgcgtcgcttgatcctctcggccacggagcgggacaccctgcttgcgctgccggaaagccaggatgacctgatccgctactacaccttcaacgactccgacctgtcgctgatccgccagcgacgcggcgacgccaaccgcctcggcttcgccgtgcagctctgcctgctgcgctaccccggttacgcgctggg

SEQ ID NO: 1563 - DNA, 260 bp, Artificial Sequence
  Description of Artificial Sequence: Synthetic polynucleotide
gcctggtaagcagagtttttgaaatgtaaggcctttgaataagacaaaaggctgcctcatcgctaactttgcaacagtgccccctaacctgatgtcagatgccatgtgtaaattgcgtcaggataggattgaattttgaatttattgacatatctcgttgaaggtcatagagtcttccctgacattttgcagggaattccatgactggacagcgcattgggtatatcagggtcagcaccttcgaccagaacccggaacgg

SEQ ID NO: 1564 - DNA, 260 bp, Artificial Sequence
  Description of Artificial Sequence: Synthetic polynucleotide
tatgatgtggctgtttccacgctttataagaagtttccggcgtcatcatttcaatcctaaaccttggtttaagagaactcggtaccagcggtgaaaagatccccctgttgagcacggctaacacatggagtgcacgccagactttcaacggcgggatcaccggggcgctgacagggaacgccgataccgcaacgaaattgaaaacagccagaaacattaatggcgtcaggttcgatggttctggtgacattaatatcaat

SEQ ID NO: 1565 - DNA, 260 bp, Artificial Sequence
  Description of Artificial Sequence: Synthetic polynucleotide
tatgatgtggctgtttccacgctttataagaagtttccggcgtcgtcatttcaatcctaaaccttggtttaagagaactcggtaccagcggtgaaaagatccccctgttgagcacggctaacacatggagtgcgcgccagactttcaacggagggatcaccggggcactgacagggaacgccgacaccgcgacgaaattgaaaacagcacgcactattggcggtgtggcatttgatggtactgcgaatattaatttacct

SEQ ID NO: 1566 - DNA, 74 bp, Artificial Sequence
  Description of Artificial Sequence: Synthetic oligonucleotide
ttaaatataagtagaccaactttagataagttaataaaagaacatgaagaaaaagagtagctttaaaactactc

SEQ ID NO: 1567 - DNA, 260 bp, Artificial Sequence
  Description of Artificial Sequence: Synthetic polynucleotide
tagtgtattttgaaagaaaaaaatttgagatctaaagatgaaagaacttatcaagatcaacaagcaaaccttttttcttcatcaaatagaaataagctacgagtattgttactagttaccaacctaatagttgtttattgaaaagcaaggatgtttatactataatatagtacatgaagttgagtcattgggctaaaaagatgggaataagttatagaagagcatggcaaatgtataaggatggcaagctaccaaatgcg

SEQ ID NO: 1568 - DNA, 260 bp, Artificial Sequence
  Description of Artificial Sequence: Synthetic polynucleotide
tgcaaacattacgggaagcgtcgctatgccaaaaaaagcgatgatatcccgaaaagttgagatattcccgaacgttaaagatgccatggtcctcaagagatggtgcggactgtatcgtcggatgtataatctcgcgattgaaaagatgctcgacacaggtcgctggcattggaagggacacaaagttcttacgacatatgacaacatcccaaagaacgaaaaagtccgtttactcccgacgaacatccgtaaggaagcat

SEQ ID NO: 1569 - DNA, 260 bp, Artificial Sequence
  Description of Artificial Sequence: Synthetic polynucleotide
tatgatgtggctgtttccacgctttataagaagtttccggcatcatcatttcaatcctaaaccttggtttaagagaactcggtaccagtggtgaaaagatccccctgttgagtacggctaacacatggagtgcgcgccagactttcaatggcgggatcaccggggcgctgatagggaacgccgacaccgcgacgaaattgaaaacagccataaacattaatggcgtcaggttcgatggttcggctgacattaatatcaat

SEQ ID NO: 1570 - DNA, 260 bp, Artificial Sequence
  Description of Artificial Sequence: Synthetic polynucleotide
tttccagcttcctctgagtggtcatgccataccatttttgcccgacgccaaataccgaactcgttaacggataatctccagctggttgatagtttcccttcggctgatacttttccggtaaaccaaggtttccgggaatgcagccataaccggataaatccgtaataatcccgtcattacagcaaacatgagggaaaacaatggcggtcatcggctatatccgcgtgtcaacaactgaccaaaacagcgatttacagcga

SEQ ID NO: 1571 - DNA, 260 bp, Artificial Sequence
  Description of Artificial Sequence: Synthetic polynucleotide
ctttaataggacattttcgtctattatctataaaaagatcatacgacagtgttttctttttccgtttatttgtgtgcatatcatttcctaaaagctatatattatatattctttaagtcattattatattttgataaaaaaatattataatattttttataaagaaatataaaaagatattaaaaaaaatacaataaaaaatgccaaagtacttaggagggaaacaaacaagtgaaattttaggagtacatcaaagaaca

SEQ ID NO: 1572 - DNA, 260 bp, Artificial Sequence
  Description of Artificial Sequence: Synthetic polynucleotide
cagctcagtattgcccgctccacggtttataaaattcttgaagacgaaagggcctcgtgatacgcctatttttataggttaatgtcatgataataatggtttcttagacgtcaggtggcacttttcggggaaatgtgcgcggaacccctatttgtttatttttctaaatacattcaaatatgtatccgctcatgagacaataaccctggtaaatgcttcaataatattgaaaaaggaagagtatgagtattcaacatttt

SEQ ID NO: 1573 - DNA, 260 bp, Artificial Sequence
  Description of Artificial Sequence: Synthetic polynucleotide
ggaactaccgcccagtgtgttgttagtattcacgccgaaggaagatgtctgtggcagggttaacttcccgctcatctcatcgccagttttctggactgcgcccgcagcttgctttgctgtttcgcctaaaccgaggtttatgaaaatgcagaaaacggtcgtaaatggcatgatcccagccttttgcgagggggcctgttgtgcaaattggctatgtacgggtgtcaacaaatgaccagaatactgatttacagcgaaac

SEQ ID NO: 1574 - DNA, 260 bp, Artificial Sequence
  Description of Artificial Sequence: Synthetic polynucleotide
gaattgggagtaagtagaccaacattagatagattaataaagagccatgagagtaactaagaagagcaatatatatgcttaagttaattttagtggggcaaattcatagaattatgccctttaattatgtctgaaataattataaataactgtttttaagtataggggggtatccttctattttgaaaaaagtattttttatggaaaatgagttctggaaattttctagcaaaatttaaaaaccagagatacatcttgaa

SEQ ID NO: 1575 - DNA, 260 bp, Artificial Sequence
  Description of Artificial Sequence: Synthetic polynucleotide
ttgaacttggtaaatctgcacaaagacatgcatttaataaaccttcgttattacatgcaacatgatatttttcgtataaatattgtaatattttcaatgattcataacatgttttatgcgaaaatccagatgctatatgtccatgttcagaccattttttatataaaactatataaaaaaatgagaatataaattgtattatgcgatcaaaagatgttttaaaaattttaaatgtaacaagagttactcttacaacttat

SEQ ID NO: 1576 - DNA, 260 bp, Artificial Sequence
  Description of Artificial Sequence: Synthetic polynucleotide
taaaacaatattatgatgacaatggtgttgtagcaattacaggaattttatctaaagaagaaaatgcgcgacaatatcttcccgaaccatcaccaaatggtaaatatatttttacaaaaaataaatatgattcaatatatcatcatccgaccatttttttatataaaactatataaaaaaatgagaatataaattgtattatgcgatcaaaagatgttctaaaaattttaaatgtaacaagagttactcttacaacttat

SEQ ID NO: 1577 - DNA, 260 bp, Artificial Sequence
  Description of Artificial Sequence: Synthetic polynucleotide
ctttttgatgttagcatttccactctttacaagaaattccctgtaaatcagtcgcgttgaaagtggcgatattgtaccagtactgacacatcgtgaaatacgtgcgccgcacgcctggcaaccagaacataaggtatccctgtcaaccggagagactgccttatggctcaggattaccaccacggggtgcgcgttgttgaaatcaacgagggcacccgacctattaccacggtgagcactgccatcgtgggcatggtctg

SEQ ID NO: 1578 - DNA, 260 bp, Artificial Sequence
  Description of Artificial Sequence: Synthetic polynucleotide
ataacaggtactttcgcttcttgtctcttctcgcgatttccttcaccgcgacgcgtgacatcgagattgccataatttcgaccctcatatttctcaccatcatctacctgattaagacgcccgaagagcgagcaaaggatgggttcctttaaatttttgaaatttcaaaattttcccgccaaaaaagattctcaccgacgatgaggcacgcgccagaacccagcgcgtgtgtcatggtgcggtcaccggagcgtccgaag

SEQ ID NO: 1579 - DNA, 260 bp, Artificial Sequence
  Description of Artificial Sequence: Synthetic polynucleotide
gcagatgtgataggggtgaatgtgaagacgctatataagtacctaccagccgctgtgtagtcgttgggatggggcatggatggggcatgggaagtcagtgaaatccgccaaatattgcaaacaacgcatgttgatcactacatccagccattgaaaatggcgctcctggacgatatttgtcgatttttaaaactaactcatcaccgtggtgatatgacgagggtgactcactaccttgttgatatataagattattgttt

SEQ ID NO: 1580 - DNA, 260 bp, Artificial Sequence
  Description of Artificial Sequence: Synthetic polynucleotide
gtatcaaaaacgtatggagtagggctctcaactctgtataaaaagtttccagctagctaataacgggaaagaaacagagaagggcacaaatattgtgtactttaatgtgccctttaatttattgattggtggttgaattgtccgtaactttttgatttaagtgcaaatttctaataaattagaacactttcttaaattgtcatttggcatattacgaacaattccgcgtaaaaacgttctgttacgctaaacccttatcc

SEQ ID NO: 1581 - DNA, 260 bp, Artificial Sequence
  Description of Artificial Sequence: Synthetic polynucleotide
gtatcaaaaacgtatggagtagggctctcaactctgtataaaaagtttccagctagctgataacgggaaagaaacagagaagggcacaaatattgtgtactttaatgtgccctttaatttattgattggtggttgaattgtccgtaactttttgatttaagttcaaatttctaataaattagaacactttcttaaattgtcatttggcatattacgaacaattccgcgtaaaaacgttctgttacgctaaacccttatcc

SEQ ID NO: 1582 - DNA, 260 bp, Artificial Sequence
  Description of Artificial Sequence: Synthetic polynucleotide
gtatcaaaaacgtatggagtagggctctcaactctgtataaaaagtttccagctagctgataacgggaaagaaacagagaagggcacaaatattgtgtactttaatgtgccctttaatttattgattggtggttgaattgtccgtaactttttgatttaagtgcaaatttctaataaattagaacactttcttaaattgtcatttggcatattacgaacaattccgcgtaaaaacgttctgttacgctaaacccttatcc

SEQ ID NO: 1583 - DNA, 260 bp, Artificial Sequence
  Description of Artificial Sequence: Synthetic polynucleotide
gtggcattacaaatgggcgtatctcgcgccaccctttaccgcaatctggagaatgcataatgtttgacatcaacctgaccaagaacgccctcacccaagtgcaagaggctcaagcccaaaacgcccagctggcccgcctgatgtgtgacgttgcggatggccgtcactacatgatcatgcagggtgccaccaccgtgagcgtggttgcccggcagcagggtgaaactagagtggtgaaggtctacccgactcccttcctc

SEQ ID NO: 1584 - DNA, 260 bp, Artificial Sequence
  Description of Artificial Sequence: Synthetic polynucleotide
gtcgccacccagatgggcgtatcccgcgcaaccctgtatcgcaatttggagaccgtataatgttcgatatcaacctgaccaagaccgccatcgcccaagtggaagaggcccagaagctaaacacccagctcgcccgtctgctggctgacgttgccaactcccgccacttcatgatcatgcaaggcgcctcaaccgtgagcgtggtggcccgccagcagggtgagcaaagagtggtgaaggtctaccccacgcccttcctc

SEQ ID NO: 1585 - DNA, 260 bp, Artificial Sequence
  Description of Artificial Sequence: Synthetic polynucleotide
attgccaagcagatgaatatttcccgttcaaccctttaccgcaatctggagaccgtgtgatgagcgagcaacttactgttgataactttactcacctgcttgagtgctcgcaccggttcaggcgacacgttaagcgctactggatgaagtgccacatcttgagcaccactaagagcggtagcctcaaggttcaggtctatggccgcctgtactggggtggcgatgaggcaaaaatcagatacgtcgagcccatccgtgtt

SEQ ID NO: 1586 - DNA, 260 bp, Artificial Sequence
  Description of Artificial Sequence: Synthetic polynucleotide
gtggcctcacaaatgggcgtatctcgcgccaccctttaccgcaatttggagaaagcataatgtttgacatcaacctgaccaaatccgccctcacccaagttcaagaggcccaagcccagaacgctcaacttgcccgcctgttgtgtgacattgcagatggtcgcggatacatgatcatgcaaggcgccactactgtgagcgtggttgccagacagcagggtgaaaccagagtggtgaaggtctaccccaccaacttcctc

SEQ ID NO: 1587 - DNA, 260 bp, Artificial Sequence
  Description of Artificial Sequence: Synthetic polynucleotide
gtggcaacacagatgggtgttagccgcgcaaccctgcaccgcaatttggagactgcataatgttcgacatcaacctgacccgcaacgccatcacccaagtggaagaggctcaagacctcaacgcccagttggcccgcctcatgtgtgacgttgctgatggccgtggctatatgatcatgcaaggtgccacaaccgtgagcgtggtcgcccgccagcaaggcgaaaccagagttgtgaaggtctacccctcccccttcctc

SEQ ID NO: 1588 - DNA, 260 bp, Artificial Sequence
  Description of Artificial Sequence: Synthetic polynucleotide
actatctgggttcgagcgaaagcagagcgtgacgccatcatggccgaacacgcctccaagatggccgacctacgcgccaagcaggaacaagacagagccgagctgatgatcaaggcagccgccatggcagagcgtcaggcacaactaaaaaccctctgggccacctccgcgcccaagagcacaaaatgggaatacaagtcatgatattcggatacgcaagagtgagcaccgctgaccagaatcaccagcttcaactggac

SEQ ID NO: 1589 - DNA, 260 bp, Artificial Sequence
  Description of Artificial Sequence: Synthetic polynucleotide
acagtcttcacagcaaaataccatggaaaacgaaagtataatttcgacaagaaagattagaatatttccatgtaaagaacatattgatttattcaataaatgttttggtgctactagatatatttataataaaacattagatgctattaaaaaattatacaaaaagaattccaaagctcttcgcaccaaagccaaaaaaggatgtgttcatatcgcaccaaagaaaaaatcaggaagtaaaactaccaaacataaaactc

SEQ ID NO: 1590 - DNA, 260 bp, Artificial Sequence
  Description of Artificial Sequence: Synthetic polynucleotide
aattaatagtttgtgcagcattttgaatcacaatatcaagttgattttttccaaatatttcatttatttctccaacaagattatttatcgattgttttacatttgataaatcaaatgactgattctaaaaatctatataaaacaaacaccagattttttatttataactgatataaacattaattattatttaatcattaatgtcgtatgtcagttccaaagaagcgcaagccttcttcaaagtctccgatcaaactctt

SEQ ID NO: 1591 - DNA, 260 bp, Artificial Sequence
  Description of Artificial Sequence: Synthetic polynucleotide
gcaaacgttaaaaaaaggattaaagatgagaatgagtcgaggggagcttatcggatttaatggttgtcttggttatgattaccatgccgaagataaatcattaagtgtcaatgaagaagaagctgaaaccgttagatacatttttaatcgctatattgagggcgcaggatgtttcgtaattgctcgtgaacttgagaatcttggatataaaactgcaggaggtaaaaccaagtggtttgattcatcagtaagagggatta

SEQ ID NO: 1592 - DNA, 260 bp, Artificial Sequence
  Description of Artificial Sequence: Synthetic polynucleotide
tacgtagtaatttgttgtgttgctccattttttgttatataatcactaatataattataacacatatcattgtaaatattatccgttcccattttagtgcaaaaatttattaaattaactgtttcttaaaatctatttaaaacaaacacctattttttttatcataactgatataaacattatttattatttaatgattaatgtcgtatgtcagttccaaagaagcacaagccttcttcaaagtttctgaccaaactctt

SEQ ID NO: 1593 - DNA, 260 bp, Artificial Sequence
  Description of Artificial Sequence: Synthetic polynucleotide
atcatcaacctgattaatcagggtattgtcgatgaacaaatgcgtgaacgactagatgataaacaggcgagctttgatgcaacacttgaaaatagtgaagcagtaacgaagttccaccaatctattgtgaagaagaaacgtaaaaagaaaaagaaagtcgtaagtgacgatgatgagtggtaagaggagatgaactatacatggaagcagttgaaaagaaacgtggcccgtggtcagaagaagaagatttaattttgatg

SEQ ID NO: 1594 - DNA, 63 bp, Artificial Sequence
  Description of Artificial Sequence: Synthetic oligonucleotide
acgcaggccgccaacgacgaccaggccctcgacgacgacaggggcgccgacggggggtgagcg

SEQ ID NO: 1595 - DNA, 64 bp, Artificial Sequence
  Description of Artificial Sequence: Synthetic oligonucleotide
acgcaggccgccaacgacgaccaggccctcgacgacgacggaggcgccggcggggggtgagcct

SEQ ID NO: 1596 - DNA, 66 bp, Artificial Sequence
  Description of Artificial Sequence: Synthetic oligonucleotide
acccaggccgccaacgacgaccaggcccacgacgacgacgggggcgacgccggggggtgagccgtt

SEQ ID NO: 1597 - DNA, 260 bp, Artificial Sequence
  Description of Artificial Sequence: Synthetic polynucleotide
tgcctcaatggctaaacttgttggtttagctgtttgctgaatcatctattttacctctttatattctacttttaacgcgggattcatgagacaacgcctttaaacctatataagcactctatttaatttttgtctatcagtttgtatacagttatgtataatactatgggcaaaaataaactaatcaggctgcgttatctatggttactggattaaaagattatagtgactgcgtggggtattgtcgggtttctactcaa

SEQ ID NO: 1598 - DNA, 260 bp, Artificial Sequence
  Description of Artificial Sequence: Synthetic polynucleotide
gcaggattgaccggggtcgattcgttacgtacccgattgagcgattttcgtcagtgttaaaatttgaatttataacttattcgttcagtagatgattactctttttgtatactgatgggagaattaaggatcgatggagctattttggcagggttgaaagttaatggaattgataagttgggagatgtgaacatggcgtttgagcagattccagaacattttcgttttattgcggaaacacttagatggcaaacaacaga

SEQ ID NO: 1599 - DNA, 260 bp, Artificial Sequence
  Description of Artificial Sequence: Synthetic polynucleotide
gagatcacggtctcgtctgacgtggtggaagtgacggaagcagacttacaacacgactaaccaccacggcttactacacgcatgagtacacagtcgttcaatttcacatggaaactctcagccaaacagcgggagttattcgagtcagacgcgcggttccgcgtgggcatgatgggtcgccggttcgggaagaacgaagtctcgacggcgatagaagtcgattacgccacccaaccccacaaatacacgttcggcacaga

SEQ ID NO: 1600 - DNA, 79 bp, Artificial Sequence
  Description of Artificial Sequence: Synthetic oligonucleotide
agcctcggagaggccctcacaggggctttcgcagacgacccgggcgaggacggcggatagcccgtcgagggggtgagca

SEQ ID NO: 1601 - DNA, 79 bp, Artificial Sequence
  Description of Artificial Sequence: Synthetic oligonucleotide
agtctcggagaggccctcacaggggctttcgcggacgacccgggcaaggacggcggatagcccgtcgagggggtgagca

SEQ ID NO: 1602 - DNA, 260 bp, Artificial Sequence
  Description of Artificial Sequence: Synthetic polynucleotide
agttatttgagcgatgaagaattagacaaagaattgaaggagttacaaggcgatgaataaaacaatgagcagggccgaaaaagaaaagctgtttatgctcattcgcgaaaagagaataagagcggcccgccggagtttttgggaatattgccgtttggagagcccggacttttacacaaaagagcgttggcatttgcagctttattgcgaaacgttgcaagccttgtacgagcgccgattaacaaaacaatgttttcgtg

SEQ ID NO: 1603 - DNA, 260 bp, Artificial Sequence
  Description of Artificial Sequence: Synthetic polynucleotide
actcggtgaaaaaaaatctctcgagaaatatgatttgtttcatctgagaataacgaatagtacaatgaatatatattcagttcatgctagtttcaatttttgcaatgcccaagaaaaattgaatattgaatgtaatataggtcccattagttagtggactaagtatctccagttattaattttctgactcattgcagattatggccacagttgtcgttgatggtaaagagcgaagtagtaattacgatcgacaccataat

SEQ ID NO: 1604 - DNA, 260 bp, Artificial Sequence
  Description of Artificial Sequence: Synthetic polynucleotide
tacttattagatatattcctattccatatcgcaccagacctaaaagtttggtactatctatttacagtggcatttataggagctattaaatcagtcatcttagtagaaatacaagacaaaagagaaaacaacaaataaaagtattgacacatcctccttgatactgtatacttattatatactattaaggagggttgtaattgagaaaattaactactacagatatacaagagatatatgtaagcactcagacacaaaag

SEQ ID NO: 1605 - DNA, 260 bp, Artificial Sequence
  Description of Artificial Sequence: Synthetic polynucleotide
ttaatagaagacttaataaaggaatattcaggaggaacaataaaaacaaaattatcgtagataacagtacaaacaattattttttcatagcgccgtttagccaagaagaaatagatgcattaatacctgaagaaaaaatattaatttttcaatttattcaatgtaatttataaaaattaaattaaacaaatttactgacgagctataatgcggcgcttttcttgaagactttgcaattttgaatggaacgcaaactgttt

SEQ ID NO: 1606 - DNA, 260 bp, Artificial Sequence
  Description of Artificial Sequence: Synthetic polynucleotide
agtgggagcaggtcggacggttgctggctgcgggggaatctcgtcaacgtgtggcactgatttttgatattggcctgtccacgctctataaaaaattcccctcatcagcgacaaagaataaattgtgtcatcccttagccaaccgggacaaatagcctgacatctccggcacaactgaaaataccactcacccattaaccacggagttaaccggatgagtgactatcatcacggcgtgcaggtgctggagattaacgacg

SEQ ID NO: 1607 - DNA, 260 bp, Artificial Sequence
  Description of Artificial Sequence: Synthetic polynucleotide
gagtggaatgtctcatctgaggtggtcgaagttgtctcgagcacaaccgaactcgaatagaacaatcggctatcgactgtctgaactccagaacagaatttatgactcagatagccggtttcgagttgcaatgatcggtcgtagaggtgggaaaaatgaggctgcgacagttacagcagttgattatgcaattgacccatcgaagtatgcatatggggcagatgagagtcctgtcatttggtgggttggtccgacataca

SEQ ID NO: 1608 - DNA, 260 bp, Artificial Sequence
  Description of Artificial Sequence: Synthetic polynucleotide
atttccgttgttatcgtatcccctacatatttatgagtgtttgccattgcaaaacaccgcctctctttaagttgataccatcgtaccatgtattttactaaaagacaacaactattttatatatttttcgtttttcgcctttcttctattataggcgaatttattaaatgtgatataatagagaaaagggggctttattaatgccatatatcaatgaaaatatagaattacacgggaacgctaaaaggatagaatacgag

SEQ ID NO: 1609 - DNA, 260 bp, Artificial Sequence
  Description of Artificial Sequence: Synthetic polynucleotide
atttccgttgttatcgtatcgcctacatatttgtgagtgtttgccattgcaaagcaccgcctctctttaagttgttaacatcgtatcatgtattttactaaaagacaacaactattttatatatttttcgtttttcgcctttcttctattataggcgaatttattaaatgtgatataatagagaaaagggggctttattaatgccatatatcaatgaaaatatagaattacacgggaacgctaaaaggatagaatacgag

SEQ ID NO: 1610 - DNA, 260 bp, Artificial Sequence
  Description of Artificial Sequence: Synthetic polynucleotide
gtttcatcgccggacatagaaatatcggtctctgaggcaacatatgagacatggcagtagcgcaagagtcaatcagtattaccccgaccgagtatcaagacgtattcttacgtaaagacaagcgttactatgcatttgtctcaggtgttggggcgggcaagacctacgctggtattgtccgaacgattctcaatatgcgtgattggaatcccggggaaatgggtgcaatcgttgcaccaacacgacagatggttgtaaac

SEQ ID NO: 1611 - DNA, 260 bp, Artificial Sequence
  Description of Artificial Sequence: Synthetic polynucleotide
gtctcatcaccggatatagaaatatcggtttctgaggcaacatatgagacatggcagtagcgcaagagtcaatcagtattgacccaacagcgtatcaagacgtgttcctacgcaaagacaagcgatattatgcgtttgtctcaggtgtcggagctggcaaaacctatgctggaattgtcagaacgattctcaatatgcgtgattggaatcctggcgagatgggggcaatcgttgctccaacacggcagatgattgtgaac

SEQ ID NO: 1612 - DNA, 260 bp, Artificial Sequence
  Description of Artificial Sequence: Synthetic polynucleotide
tttctgatatcatcttatcatgcaacataactttttgtaaagtgttatttttaacttttttaatttgttgttttgttatgttgcgttgttgatgtctcttatattaaaggtattatatttgaaagtcaacaggtttatgcaatttattttaaaaagttaaagttaatcatgatataatagagaaaaggaggtttttacaaatgccatatatagaagaaaaagttaaactacatggaaacgctaaaaggattgagtatgaa

SEQ ID NO: 1613 - DNA, 260 bp, Artificial Sequence
  Description of Artificial Sequence: Synthetic polynucleotide
tacaaatacctagagaagaacaactatgaatacaaaaatcaaaaactcaaacgaaagtgaatacatgccatctgttcgtggtaatccagcagatgcattgcagacattcttcgttaccattcgtgacacccgcacaggagaactacatgaggacatgagaactcatcactacaatgatgaagcctgtgcatactcagtcatgcaaaatttaaaagatgggtttgagctagtccacgttttcaacccagaactaaaaacta

SEQ ID NO: 1614 - DNA, 260 bp, Artificial Sequence
  Description of Artificial Sequence: Synthetic polynucleotide
atggatacaacagaaatagaagcagccatagctaagataagaataagaacaaaaaagtaatacttaatactcattaattttaattaaaaaaactaccattttatagatatttgatgtaaaaataaagcatggtgtaaatttacattgtaaaatatctattttgatgtaaaaataaaattaaaaacgtaattaatttacaaaaagaaggataagtctttgactctaattttacatttatgctataatattatttatagagt

SEQ ID NO: 1615 - DNA, 260 bp, Artificial Sequence
  Description of Artificial Sequence: Synthetic polynucleotide
aaaatagatgctcccattttgttacgcacccgattaagcgattttcgcacatcgagatgaacagataatgtacaaaaaattgatttatatggtggagaggatgtcctttatctctggatatatatcagaagctgcaatggccgcagctgtcgccgttgttgaaagtaaaaccggtcatgatggatttcctaattttttcgaagacttttatgaagttaaaccgaaagacacgactgtggcgtgtatcgcgagtgccaaag

SEQ ID NO: 1616 - DNA, 260 bp, Artificial Sequence
  Description of Artificial Sequence: Synthetic polynucleotide
ggctgctaccagcgcgcgcggagggcattgcgccgggtggccgaggaggtggggctgtgagttgccgctaccagttcatgggcgagcaggaggacgccgacctcgacgtggtgctgtcgaggggcatgacacgcgtctacgacggtacggcggcgccgcgctccgggcgtgtcggctgccccatcgccgggtgccccgacgctgaggcggaggacaccctgtgtgaggcgcactggatggagttccatgcatcgcctgag

SEQ ID NO: 1617 - DNA, 260 bp, Artificial Sequence
  Description of Artificial Sequence: Synthetic polynucleotide
cgtacaaatgcggaaatcgaagaacagcttcagaaattaaaaaaattgacaggcgagtaaaaggagggcgggctacatggcatatatagacggtaaatggttagcccgtcaagaacgtcaggagcgtatcaatcttgtagcagaaagagcaaagaaattacaggagttgtacgaaactggcgaggctacagaatattatatggatacactacttgctgacatcgatgagctagaaaagttaaaaagggtacatcgtggag

SEQ ID NO: 1618 - DNA, 260 bp, Artificial Sequence
  Description of Artificial Sequence: Synthetic polynucleotide
tcagaaattgcaagaggtaaaaaattcggtgaggttgtagaaatggaggaagcaaactaatgtgtgaagttaaaaatactatggcccaattagaagcagctttaaaagtaaatccatcaattttaaaaggtgtacaagctttaataaataaatacgatggcgcagcagctcccaactcctacgccgcattaaaaaacaatatcactaccagtaataccctaaacacgttgattgtattctgccaaaattgcgatttacaa

SEQ ID NO: 1619 - DNA, 260 bp, Artificial Sequence
  Description of Artificial Sequence: Synthetic polynucleotide
attgctcgtaagtttggatgtaagcgggatactgtataccgacttttaagactacgttgatttaggtgacactatagaaggtagcctaggtaatctaggtcttataggtagtatagataaataagctaaatataggagattaaatatgtcaatggtaactactctggtagcactgtctcaattcttccgtaacctgtccactcgtatccgtaacaaggcaatcaatgcaatcaaagaccgcatcgctgtggttgaagacc

SEQ ID NO: 1620 - DNA, 260 bp, Artificial Sequence
  Description of Artificial Sequence: Synthetic polynucleotide
cccaagccggctgcggacaaggcaaagctggtcagcaagattgaggcccagctggctgaggccggcaggccatgggagtacggcgacggtttggcaaagcgcctgtaccaggtagagcggctggagtggcttgactccaagcaactgggtggcgtcgtcgccgctctggccaaggacgcgaaacgacacgggaggcgacaatgagcaacggagagttattcgatagtggggaggtcgacaagctagagccggacaaggtg

SEQ ID NO: 1621 - DNA, 260 bp, Artificial Sequence
  Description of Artificial Sequence: Synthetic polynucleotide
accacgctgcgccgccacgggcacgcgctgggcaccaagggccgtgcgtcgtggacgtagacacctcgttcgactgggacgtctggcgcaaggcctggggcagcaacaagcaggtcatcgtcggcggggtcaacgacttcttcgcgctcccggagccgccgggggattgcgagtggctgctgacccggaccctgaccggcgagcaccccacctacaagctggcgctgctgtggcgcgagctgttcgacaccgggccgcac

SEQ ID NO: 1622 - DNA, 260 bp, Artificial Sequence
  Description of Artificial Sequence: Synthetic polynucleotide
gcgtgttttttagaaaacccaataaagataattataatgtagatgccttagatcttgtagatttatgcaatcgttcatattcagacatatctaattccatattcgttaataaaaaagcagatagcatagatgactagtttgtctcaagtcgttacaacgtgtgtttaatttaaagcttttttatattatccattatataaatggaagtagattatgttacaacgaaagaaacttgtcgaattacaggtttcaaagctcca

SEQ ID NO: 1623 - DNA, 260 bp, Artificial Sequence
  Description of Artificial Sequence: Synthetic polynucleotide
tatgcggatgagggaatctcagcaactaatacaaaaaacgtgatgcttttaaccgactaatacaagattgtagagatggtaaggtggatagaattttagttaaatctattagtagatttgccagaaatacattggactgcatcaaatatgtaagagaactgaaagaactaggcattggtgtaacgtttgaaaaagagaatattgatagtctagattcaaaaggagaagtactacttaccattctatcgtcactagcacag

SEQ ID NO: 1624 - DNA, 260 bp, Artificial Sequence
  Description of Artificial Sequence: Synthetic polynucleotide
aatgtagagagaaaaacaggttctaaagaagaagtacttaatgatgaacaagaggaataagaaattgtagtagaattgtaggtgtgtaacatatgagtttttcagataaattaaatgagatgaggaataaagaacattatggttctcctagtaatgaagaaaatacacaaataaagaatatagaatcaggttatacattagaagagcttaaacattccttattagatttagaaggtttagaaaatgtagtaagtaattac

SEQ ID NO: 1625 - DNA, 260 bp, Artificial Sequence
  Description of Artificial Sequence: Synthetic polynucleotide
gacgctgatttagagcaagaattgggcgaactagacgaattattaaaggacgatgattgaaacgaggtgataacgagtgggaattttgagtaaaatcggacgcaaatccgacgcagagttaaacgaaaccggatccgtcacttacacatatgacgcattcaagcctggtgaacaatttccgccagcaaacgcaattgaaagaatttcgaaatatcgtcgtatgaaaaagttatatgacggtaaacaagccgaaatatacg

SEQ ID NO: 1626 - DNA, 260 bp, Artificial Sequence
  Description of Artificial Sequence: Synthetic polynucleotide
gacacatcacctgcaaatgacaacactcccgaacgactactaaccgctatggggcaatgacgaaatggagtttttccagaaatttctagataacattgggtggggcatcgctggcataatgggtgcgctggtttcgctcccgttccacgatgacatcaaatctgtaaaggcgcgcatctggttcgtgtgtaccggtgcaatctgcgcttacttcctgacagacctggtttctttgtatttcaaaattgatcgcgggctgg

SEQ ID NO: 1627 - DNA, 260 bp, Artificial Sequence
  Description of Artificial Sequence: Synthetic polynucleotide
atacattaatataggaaattgttgtcaccttagtcacccgaacgccaaaaacgcgcactttctctttataaatcaagatgattgacgggtgacaagcgggtgaccaactctttgccaccttgtcacccttttctggtcaccgttcatcttttcggctacaatccccatattgacttttatttataattattgggggttacatggaattaccgcgcactgtgcaggaaatagctgacgttattggccgtgaacgtgcgcta

SEQ ID NO: 1628 - DNA, 260 bp, Artificial Sequence
  Description of Artificial Sequence: Synthetic polynucleotide
aaagaactaaatgtaaaacatccacaattattaaaatatatatcagacaagaatttataaaaaagaattggtttattttttcgttttagaatttttctttactgttttttcttcctcttctgaacttgattctgaaaaactgctttccgattcactttcttcttttttagaaaattttttttgtttctttttatctttgatattttttatttttacatcttctttttctgattccgaatctgatgaactactttcttttt

SEQ ID NO: 1629 - DNA, 260 bp, Artificial Sequence
  Description of Artificial Sequence: Synthetic polynucleotide
gtaatgaaacgcattgaagaattgcgtaaaatgcaggagtcggtgaaacaggatgagtagtaaatctagcgaatttatttcgccgagagaggaacgtctcgagcttcaacggttacttaccgaagagttgtcgctattaatcgagttgattgagtgggggaaggcggaaccttcgcactatgaccgctttaaagaagtagacgaagagttaacgcaaatcaaacgaattaatcgcgctgaatatgacgtggcctattttg

SEQ ID NO: 1630 - DNA, 260 bp, Artificial Sequence
  Description of Artificial Sequence: Synthetic polynucleotide
cagaccatgagtattagtgattctaaaggacaagaatttaaagttgagtggtccaaatgaactttgatatgaaaacagtattgccttacatcgtgattgtagcaagtttagcgatgacatggggtatgtggagtcaaagattagaagctgttgaaacaaaagcagattctatatcatatatgcaacaagatatagctgtcatcaaagaaaaaataatatggatagagaactaccttataggtaattaatgaaaatgtttt

SEQ ID NO: 1631 - DNA, 260 bp, Artificial Sequence
  Description of Artificial Sequence: Synthetic polynucleotide
cacgggcaaagatcggaagggttacgccagtaccagcgcagccgtttttccatttcaggcgcataacgctgaacccagcggtaaatcgtggagtgatcgacattcactccgcgttcagccagcatctcctgcagctcacggtaactgatgccgtatttgcagtaccagcgtacggcccacagaatgatgtcacgctgaaaatgccggcctttgaatgggttcatgtgcagctccatcagcaaaaggggatgataagttta

SEQ ID NO: 1632 - DNA, 260 bp, Artificial Sequence
  Description of Artificial Sequence: Synthetic polynucleotide
caggaaattgaacatactggaacggtggtgtttgcgaatgaagacaacatcccagattaaagttgatttgccaactatagttggagaaggttacggggctttttggggtgataaacatttttatagagtggtaaaaggtagccgtgggtctaaaaaatctaagactaccgcccttaattttatagttagattactgaaatatgaatgggcgaatttattagttgtccgcagatattcaaacactaataagcaatcaacct

SEQ ID NO: 1633 - DNA, 260 bp, Artificial Sequence
  Description of Artificial Sequence: Synthetic polynucleotide
agaaagctgcatacacggcgtcatcagcctgatctgttctcacctgaaagcccaaaataaccggcatcctgccggttatttcctgtcaccataatcccgcacctgtcacctgattttttagactgccatcagagatttttttcagggaagcatgatggcggggataccaaaaaaactgaaagccgcactgctggcggcaacgattgccggtggtggtgtgggtggttatcaggaaatgacccgtcagtctctgatccatc

SEQ ID NO: 1634 - DNA, 260 bp, Artificial Sequence
  Description of Artificial Sequence: Synthetic polynucleotide
agaaagctgcatacacgacgtcatcagcctgatctgttctcacctgaaaccccaaaataaccggcatcctgccggttatttcctgtcaccataatcccgcacctgccacctgattttttagactgccatcagagaattttttcagggaagcatgatggcggggataccaaaaaaactgaaagccgcactgctggctgtaacgattgccggtggcggagtgggtggttatcaggaaatgacccgtcagtctctgatccacc

SEQ ID NO: 1635 - DNA, 260 bp, Artificial Sequence
  Description of Artificial Sequence: Synthetic polynucleotide
tggccgaggtgatcactaaaagtggtggtcgcattccatcgaacaacgattgcacaggcccagctggttacgaactattagctgaacattatgcgagtaactactacaaaactggttaacgtgccccaccagtaaacactgccatatactacaaacacctcgccaagcggggtgtttttgtatttatactatgtgaaggtatgccatgtggatgggaggcagtaatgagtgaagaaaaccaagacttgtttggctacaag

SEQ ID NO: 1636 - DNA, 260 bp, Artificial Sequence
  Description of Artificial Sequence: Synthetic polynucleotide
agaaagctgcatacacgacgtcatcagcctgatctgttctcacctgaaagccagaaataaccggcatcctgccggttatttcctgtcaccataatcccgcacctgccatctgattttttagactgccatcagagcattttttcagggaagcatgatggcggggataccaaaaaaactgaaagccgcactgctggcggcaacgattgccggtggcggtgtgggtggttatcaggaaatgacccgtcattctctgatccatc

SEQ ID NO: 1637 - DNA, 260 bp, Artificial Sequence
  Description of Artificial Sequence: Synthetic polynucleotide
aatcctatgaggcaagcagaatatgcatatagtttaatcggaaatgaggtgagcacttaatgaatcttgctaaaaatattaccatgattcctacaagaagaatggtgggtacgcaaaagcctgcagaaaagacacaaaaattaagagtcgcagcctacgccagagtatctacggagtttgaagaacaggaatcaagttatgatgtgcaggttgaacattatacaacttatattaagagtaatccggaatgggaactggta

SEQ ID NO: 1638 - DNA, 260 bp, Artificial Sequence
  Description of Artificial Sequence: Synthetic polynucleotide
ccagttgatccttttgaacgagcagaatacttatatagtctgatagaaagcgaggaataaagtgacagagaaaaatataatggttattcctgctcgtaaaagagtaggaagtacagccgcaaaagaaaagataaagaaacttcgtgttgctgcctattgccgtgtttctacagaaacagaagaacaaaattctagttatgaggttcaggtcgcacactatacagagtttataaagaaaaataatgaatgggagtttgccg

SEQ ID NO: 1639 - DNA, 260 bp, Artificial Sequence
  Description of Artificial Sequence: Synthetic polynucleotide
tctgctgtacttaacacattcaaagagtgcgaagataaaatagtaggtatagaagaatagataataaaaagatagcctagtttataagctatcttttttcattatgaaaaaattttaactagataagggactataaatattaataggatactcataatacctagtctaacagcaacatctatgttcatatggctacttttcttcacaaaatcacctcgactatttttctaaattattaacgaaaaaggaaataatataca

SEQ ID NO: 1640 - DNA, 260 bp, Artificial Sequence
  Description of Artificial Sequence: Synthetic polynucleotide
gatccatataagcaggcagagtatgcatatagtcaaatattggaggtagcaaatgaatgagaacgtaacattgatacctgccagaatacgagctggtaatcgaataacaaggcaagaaaataagcctaaattaagagtcgcagcgtactgtcgagttagtactgacagcgatgagcaggcggggagttatgatgtgcaggttaagcactatacagaatatattggcaggaataaagaatgggaacttgctgggatatatg

SEQ ID NO: 1641 - DNA, 260 bp, Artificial Sequence
  Description of Artificial Sequence: Synthetic polynucleotide
ttctgggcttaccccttcctgaccgacttcacatcattccgcccgctattactcaaatagcactttttgccaaacacgccgggggcaaccccggtaatatgctttccatcggcagcgaacgcagccaaccacttaaaaggaaacgcatcatgaccactaaaactgaattattcgcagagttgaacgataaagaaaaccgcgtaaatgctaccgcccacatcgcagtatataaagacggcaacggtaacacctctgtgatt

SEQ ID NO: 1642 - DNA, 260 bp, Artificial Sequence
  Description of Artificial Sequence: Synthetic polynucleotide
caagatataaacgaattagaaaatgaattaaataattttagattaaaaaaagttaaataaaataacaataaaagaaagttagataaatcttaactcaatataatttttattatattgagttacatatagtgtatgaaaaataatcgtatacaatatgtagtaagaggggtcgaaactatattattgttaataattgtaagattgataaaaaaatatacccccccccacacccttattttgaaaaaatcttttttaaggga

SEQ ID NO: 1643 - DNA, 260 bp, Artificial Sequence
  Description of Artificial Sequence: Synthetic polynucleotide
ttcagcgcctacccattcctgaccgacttcacatcattccgcccgctattactcaaatagcactttttgccaaacacgccgggggcaaccccggtaatatgctttccatcggcagcgaacgcagccaaccacacaaaagaggccaaagcgatggaaaacatgacagtaaaaaccccggtagatatccagatgcaaaagttcaacgttaagacagcgattcacactttcaagtttcacgccgtgcgcaacgctgaagcatt

SEQ ID NO: 1644 - DNA, 260 bp, Artificial Sequence
  Description of Artificial Sequence: Synthetic polynucleotide
ttcagcgcttaccccttcctgaccgacttcacatcattccgcccgctattactcaaatagcactttttgccaaacacgccgggggcaaccccggtaatatgctttccatcggcagcgaacgcagccaaccacttaaaaggaaacgcatcatgaccactaaaactgaattattcgcagagttgaacgacaaagaaaaccgcgtaaatgctaccgcccacatcgcagtatataaagacggcaacggtaacacctctgtgatt

SEQ ID NO: 1645 - DNA, 260 bp, Artificial Sequence
  Description of Artificial Sequence: Synthetic polynucleotide
ggcaaaaccctagaggacttctacgccgacgaagatgtaccgcctcaatccagtccttaaagacttctggacaacccggaagccttacaagctactcaagggaggccgcttttcctcgaagacgcaagacgctggggggatggcggcttttttggcgcgcaactattccgtccgtttcctttgccttcgccagtttcagaaccgcatagctgattctgtttacacggtcgtgaagcaaaagatcgaggaagcaggctggc

SEQ ID NO: 1646 - DNA, 260 bp, Artificial Sequence
  Description of Artificial Sequence: Synthetic polynucleotide
ccggactgccggagatgtcagggccaaaaatccgtccaccacacctgccagagcaactaggagccgcaatgaccgccaccgaaatcgacaccaaatcaccgacccgtatgggagtcctcgcctgtggacactgcctcgtggggcaccatggctgctgcccgggtggagtccgcaatggcaacggccaaatcatcctctgcgcctgtaagtgggacggctgcagggcagggcgaccccgctgcaccgactgcaacaaccgt

SEQ ID NO: 1647 - DNA, 260 bp, Artificial Sequence
  Description of Artificial Sequence: Synthetic polynucleotide
ccggactgccggagatgtcaaggccaaaaatccgtccaccacacctgccagaacaactaggagccgcaatgaccgccaccgaaatcgacaccaaatcaccgacccgcatgggagtccttgcctgtgggcactgcctcgtggggcaccatggttgctgcccgggtggagtccgtaatggcaatggccaaatcatcctctgcgcctgtaagtgggacggctgcagggcagggcgaccccgctgcaccgactgcaacaaccgt

SEQ ID NO: 1648 - DNA, 260 bp, Artificial Sequence
  Description of Artificial Sequence: Synthetic polynucleotide
cattccatcggtgaaatgacagacgaagatcttgcaaaggttattgcgggggagaaataacctcgtgaccataaccaaagcccaagccgcccaagagcttctaaacagacgtaaggctcgtcgaaatctggttgattatgcccggtacattgaggttccgggagctcctgttgaagaacaggacgaggaaagcgacgaagcagaatattttgctgagacgcagttagctaaacatcacatattgatacttgaagccgctc

SEQ ID NO: 1649 - DNA, 260 bp, Artificial Sequence
  Description of Artificial Sequence: Synthetic polynucleotide
gataaaagtatgcagcatatctatcgcgtagtcgctaaaaatgcgcaagatagaagttaagaaccgtcaaccgaatttattttaaggaattgaaaatgaccatattcgacttaatagttactttaatcgttggatttattactgccttccctctttgtagggttgctaagaatcaaggcttcaaagccgattggtgggtaatgttagtattggttctgatacctgttttacaaatcccttatctttactggattgctttt

SEQ ID NO: 1650 - DNA, 260 bp, Artificial Sequence
  Description of Artificial Sequence: Synthetic polynucleotide
cgcgtagtggctaaaatgcgcaagatagaagttgagaaccgtcaaccgaatttattttaaggaagggaaagtgaaaaaattatgtttgatgcttatgatgttatcaccaactgcgttagcttcgacagttgatgagttaattgaaagctttgaaaactctaatatctatagtgctgattggtatgaaaaaggctctagcaaaattgctgaatcatcgaatgactatagagacatcaaggtaaatttaactgacaaaaaag

SEQ ID NO: 1651 - DNA, 260 bp, Artificial Sequence
  Description of Artificial Sequence: Synthetic polynucleotide
tgtgcgaactcttggcctacttcatggggctgtggatataggctaccataaaaatgaaggtacttatgtctatgagattaatactgcatgtggtttgatggggacaaccctacagctatatgcaaatgccttccgtagatattttggtctggcggaggttgtatatgaaaaagagaatacttaaaaaatatcttcatcctgtgttcagaaaaaaccaagattattttattgatgaaattggtaatgttacacgaaaggat

SEQ ID NO: 1652 - DNA, 260 bp, Artificial Sequence
  Description of Artificial Sequence: Synthetic polynucleotide
gtgaaagctctccagaatgtcattctcatactaggtcatcaacattcagaggatgactagctatgaagaaattccgttgggctaagaatcgtcctgttaaaccagacacagacccaatgctctcagatttgagagaggaattgctcaatgacgataggacttattaccagaaagccaatgcctctgggatagctccatccacaatcagaaacatcgtgaatggtaagactcgtaaaccacagggacttaccatcatgatg

SEQ ID NO: 1653 - DNA, 260 bp, Artificial Sequence
  Description of Artificial Sequence: Synthetic polynucleotide
aaggccattcgccggatgcgacggctgaaataccgccagtaccagccctcacttctgtaaacagtaaagccggttaatccggctttttttacgtcctcaatatcctgtgatgaataaccgtaccgggggaaatcatcatgggtaaaggctggaatgcatcctttcatcttggcagacgtgagcggctgcgtcaggaggttttgcaccgtgtcgccggtgggccacggcctgcgccccgcgactataccggtcatgatggc

SEQ ID NO: 1654 - DNA, 260 bp, Artificial Sequence
  Description of Artificial Sequence: Synthetic polynucleotide
aaagccattcgccggatgcgacggctgaaataccgccagtaccagccctcacttctgtaaacagtaaagccggttaatccggctttttttacgtcctcaatatcctgtgatgaataaccgtaccggggaaaatcatcatgggtaaaggctggaatgcatcctttcatcttggcagacgtgagcggctgcgtcaggaggttttgcaccgtgtcgccggtgggccacgtcctgcgccccgcgactataccggtcatgatggc

SEQ ID NO: 1655 - DNA, 260 bp, Artificial Sequence
  Description of Artificial Sequence: Synthetic polynucleotide
ttggctatatcagggtgtcaacaaatgaccagaacactgatttgcagcgtaacgcgctgcagagcgcaaattgtgaactgatttttgaagacagaataagcgggaaaaagtcagacaggccgggactgaaaaaagcactgcgctgtctgcaggaaggcgacacactggtggtgtggaagctggatcgtcttggccgcagcatgcgccatctggttatgctgactgaggaactgcgcgaaaaaggaataaacttccgcagc

SEQ ID NO: 1656 - DNA, 260 bp, Artificial Sequence
  Description of Artificial Sequence: Synthetic polynucleotide
ctcttctttttgtacttattttgaaatattcttaattttttatattcaatcataaatcacctaattttatcgctgagttaattatctgtaattaaataatatatatttagctatataatttcctaataacatatagtttacagattcggaaaatgatgatataataaatttacaagaagatatatgagaggtgaaataaattgagtagaaaaagaatgctttctgagaatgatgtaaaagaaatattacagttaagagat

SEQ ID NO: 1657 - DNA, 260 bp, Artificial Sequence
  Description of Artificial Sequence: Synthetic polynucleotide
gatcatgttgtgattctcctctattcgtgtcgcttggttgacatgtaggtccatttggaccctatgtctagcatcttttcactttttgggtgaaattatttttacgcttaactttccccttttggttgacatgtgactcgggacaggagtacggatcagacaacccggcacggaatcgccggacctaagaggagagaaatatgtcgtcaaaacccaagcccggtttcatgcgcccgagggcgaaccgggatgagatggcc

SEQ ID NO: 1658 - DNA, 260 bp, Artificial Sequence
  Description of Artificial Sequence: Synthetic polynucleotide
ttctctggaaattttgaacttgtaattgatgggaatgagataaatgattctgaggattaaacatcctgaaaagatatttaatgatgtatattttaaaaatttgaaaaataattttggaacacagatttattttggtggggcatcttctgggaaatctttttttattttagggcagaggacaatattagatgttttaacttctaatagaaatttccttattgttagaaatgttgcgagaacaaatagacattctactttta

SEQ ID NO: 1659 - DNA, 260 bp, Artificial Sequence
  Description of Artificial Sequence: Synthetic polynucleotide
ttctctggaaactttgaacttgtaattgatgggaatgagataaatgattctgagaattaaacatcctgaaaagatatttaatgatgtatattttaaaaatttgaaaaataattttggaacacagatttattttggtggggcatcttctgggaaatctttttttattttagggcagaggacaatattagatgttttaacttctaatagaaatttccttattgttagaaatgttgcgagaacaaatagacattctactttta

SEQ ID NO: 1660 - DNA, 260 bp, Artificial Sequence
  Description of Artificial Sequence: Synthetic polynucleotide
atcgcctgcgccgtggacgtctatcacgacgaaacctcagagaccgctgctgcggcctgaatgtcaaccgaaagaggagtattacaccgatgagaaccagagtgaacgtaggccgggtgatcctgccgctccacggcaagagcaaggccccggcgcagcgcctcgcgcattggatggcgatgcaggagatggcgggcttcaaccacctcggccacccgcgcggtttccgtatcgccccgacgagccggaagaaccgccgg

SEQ ID NO: 1661 - DNA, 260 bp, Artificial Sequence
  Description of Artificial Sequence: Synthetic polynucleotide
aatgccaatgtagaaaaagttaaatcattctcggagatgtatggcaacgttaaatcctaatctcatcgactattggttcgatggcaatccagagcctagtaacttcataaaggttcgtcaccgcgttttatatggcggtcgttcgtcatctaaatcatgggagtttgctggaatggctgcgtgtcttgctaatcaatataagacgcgctttctgtgcgttcgtagatatcagaacaagattaaggaatcggtttacacgc

SEQ ID NO: 1662 - DNA, 260 bp, Artificial Sequence
  Description of Artificial Sequence: Synthetic polynucleotide
aagaaagtcactaaagaagaaattgcaagacggcagtttgatatgtttggcaatacgtaactgctagaagtgagaaaaaacgtccagaagggcgtttttttattcatatttatttacctttttggtaaataaaaaatgttgactaatatgttttaattcattaaaatgcgctttagatcaactagaggagagtaattatggcacttacagaattcggcaaagcggttcgtaaggcaagaattgatgctaacgaaactttg

SEQ ID NO: 1663 - DNA, 260 bp, Artificial Sequence
  Description of Artificial Sequence: Synthetic polynucleotide
aatgctaacgtagaaaaagttaaatcattctcggagatgtatggcaacgttaaatcctaatctcatcgactattggttcgatggaaatccagagcctagcaacttcataaaggttcgtcaccgtgttttatatggcggccgttcgtcgtctaagtcatgggagtttgccggaatggctgcgtgtcttgccaatcaatacaagacgcgctttctgtgtgttcgtagatatcagaacaagattaaggaatcggtttacacgc

SEQ ID NO: 1664 - DNA, 260 bp, Artificial Sequence
  Description of Artificial Sequence: Synthetic polynucleotide
gacgagcaatcgaagatgatccgcggcctctggcttgagctggcggatcggggcgtcgtacagaaccggtccgaggaagcgctcggggctttcgtaaagcgcatgacccatgtcgatgcgctcgaatggctcagttccgcccaggcatcccgtgtaatcgagcacctcaaaaaatggcgtgacaggacgacggaggccgtatgaaggacgaaacgttcaaaagcaaagggccggaactgctggtcgacttgtctctgcag

SEQ ID NO: 1665 - DNA, 260 bp, Artificial Sequence
  Description of Artificial Sequence: Synthetic polynucleotide
gacgagcaatcgaagatgattcgcggcatctggcttgagctggcggatcggggcgtcgtgcaaaaccggtctgaggaagcgcttggcgctttcgtaaagcgcatgacgcacgtcgacgcgctcgaatggctcagttccgcccaggcatcccgtgtgattgagcacctcaaaaaatggcgtgacaggacgacggaggccgtatgaaggacgaaacgttcaaaagcaaagggccggagcttctggtcgacttgtctctgcag

SEQ ID NO: 1666 - DNA, 260 bp, Artificial Sequence
  Description of Artificial Sequence: Synthetic polynucleotide
gatcaagcaacaccaaaaagtataaaagtggaagtgatcgacgctagacaatctaattaatgaaactaagcgtcaatgtcccacaatcgcaatttttaaaccttactaataaatatcgcgcttatgttgctggttatggtgctggcaaaacgtttattggttgcgttgctcagtgcttggacttctggaaatatcccggaataaatcaagcctatttcgcgcctaccttcccacagatacgggatatctattatccaaca

SEQ ID NO: 1667 - DNA, 260 bp, Artificial Sequence
  Description of Artificial Sequence: Synthetic polynucleotide
aatgaaaacgctaacgttgaatctgtaaaatcattttcggatatgtatggcaactcttaacccaaatcttgttgattactggtttgatggtaatccagaacccaagaactttataaaggttaggcaccgtgttttgtatggtggtcgatcttcatctaagtcgtgggaatttgccggaatggctgcttgtctggctaatcaatataagactcgatttctttgcgttcgtaggtatcagaacaaaattaaggagtccgttt

SEQ ID NO: 1668 - DNA, 260 bp, Artificial Sequence
  Description of Artificial Sequence: Synthetic polynucleotide
cgtctgatgcagcgcatcaccgcgatcgagctggaggaccggttcatccagatcgcaggcgagccattgctcgacaccgacgagggcgtcctcgtcatcgagttcggggacgggcgtcaccggaccttcaactgggaccacgtcgtgtccttctactacatgaccgaagaagagtcggctgcggctcgggaggaaaactgatgagcgacaccatcgcacaggcaaccctggacatcgacacgctcaagcggggcatcgag

SEQ ID NO: 1669 - DNA, 260 bp, Artificial Sequence
  Description of Artificial Sequence: Synthetic polynucleotide
acagctgaaatcctgaagtgccagcgaggaacgatcagaaaatatatggtgaagccatgagaaagcacgcaagaaagccagggcatgtcgagttctgcggaacctgggtaagcccgaaaggaaaacagatatacgaggcgctggaatccggcaagagctggcaggcttgcgctgatgagttcgggatctctctcgggacaatcagcggttacgcagagcgagctcggcgattcgggatagtgctgcgccagaacaagcga

SEQ ID NO: 1670 - DNA, 260 bp, Artificial Sequence
  Description of Artificial Sequence: Synthetic polynucleotide
gcaagcagtacgttgaacaggagaagacacagacagagatcgctgacgagtgtggagtagccgtgcctaccattagcgactggctcagcaagtgtggcatctcacgtgattgactggactggagtaacagcggtatgcaggcgatcagcacatccagtgagattgcgtgtgactaaccgcgggactgtagtatcaagagtgtgatgaccgacgcaggcacaatggatccgagcgacacctaccgcgacgaagactggctg

SEQ ID NO: 1671 - DNA, 90 bp, Artificial Sequence
  Description of Artificial Sequence: Synthetic oligonucleotide
aatgccaatgtagaaaaagttaaatcattctcggagatgtatggcaactctagcacctaagcagtataattactgttgaggtgattaata

SEQ ID NO: 1672 - DNA, 260 bp, Artificial Sequence
  Description of Artificial Sequence: Synthetic polynucleotide
aatgaaaatgccaatgtagaaaaagttaaatcattctctgaaatgtatgcgggtaaataatgccaactctaaacccaaacttgcaagactattggtttgatggtgagccaaagcctgagaacttcatcaaggttaggcataggattctatatggcggtcgttcatcttctaagtcatgggagtttgctggaatggctgcgtgtcttgctaatcaatacaagacgcgcttcctttgtgttcgtagatatcaaaacaagatt

SEQ ID NO: 1673 - DNA, 260 bp, Artificial Sequence
  Description of Artificial Sequence: Synthetic polynucleotide
aatgaaaatgccaatgtagaaaaagttaaatcattctctgaaatgtacgcgggcaaataatggcaactctaaacccaaacttgcaagactattggtttgatggcgagccaaagccagagaactttatcaaggttaggcataggattctatatggcggtcgttcgtcatctaagtcgtgggagtttgccggaatggctgcgtgtcttgccaatcaatacaagacgcgctttctgtgtgttcgtagatatcagaacaagatt

SEQ ID NO: 1674 - DNA, 260 bp, Artificial Sequence
  Description of Artificial Sequence: Synthetic polynucleotide
gtggctgaaatcctgaagtgccagcgcggcactgtcagaaaatacatggcgaagccatgagcaagcacgcaagaaaaccagggtatgtcgagttttgcggaacctgggtaagcccgataggaaagcagatatacgaagcgctggtgtctgggatgtcgctgcgggatgtatcagacaagttcgagatctcaatggggacggcatctgggtatgcggagcgggctcgcaagtacggcgtcctcaagcgcaggacgaagcgc

SEQ ID NO: 1675 - DNA, 260 bp, Artificial Sequence
  Description of Artificial Sequence: Synthetic polynucleotide
gtggctgaaatcctgaagtgccagcgcagcaccgttagaaaatacatggtgaagccatgagcaagcacgcaagaaaaccagggtatgtagagttttgtggaacctgggtaagcccgagaggaaagcagatatacgaagcgctggaatccggaaagggcttgcaggcttgcgctgatgagttcgggatctctctcgggacaatcagcggttacgcaaagcgggcgcgtcgatttggaatagtcctgcgccagaacaagcgg

SEQ ID NO: 1676 - DNA, 260 bp, Artificial Sequence
  Description of Artificial Sequence: Synthetic polynucleotide
tacctgcgcgcggtggtgtggggcctggccagtgatccagcgcaggctctggccgcttcctcaaagcggccgcaggccggtggacccagcacccagcaattgctccaagaccaagtcggtcgaattcagtccgatatcgtgttggggctgattactaaagaggatggagagcgccagatcgcggcgctgaaggggggagcatgaagcagagttcgattctggcggaaactcgccatgagctgctggacgacattgcggca

SEQ ID NO: 1677 - DNA, 260 bp, Artificial Sequence
  Description of Artificial Sequence: Synthetic polynucleotide
ttgcaatgcccctgctgcgccgagcagttcccggtagaggtccaggcccgggccgcttcctcaaagcggccgcaggccggtggacccagcacccagcaattactcaaagaccaggtcggtcgagttcagtccgatatcgtgttggggctgattactaaagaggatgaagagcgccagatcgcggcactgaaggggggagcatgaagcagagttcgattctggcggaaactcgccatgagctgctggacgacattgctgca

SEQ ID NO: 1678 - DNA, 260 bp, Artificial Sequence
  Description of Artificial Sequence: Synthetic polynucleotide
gcggctgaaatcctgaagtgccagcgcggcactgtcagaaaatacatggtgaagccatgagcaagcacgcaagaaaaccagggtatgtcgagttttgcggaacctgggtaagcccgagaggaaagcagatatacgaagcgctggaatccggcaagggcttgcaggcttgcgctgatgagttcgagatctctctcgggacaatcagcggttacgcaaagcgggcacgtcgatttggaatagtcctgcgccagaacaagcgg

SEQ ID NO: 1679 - DNA, 260 bp, Artificial Sequence
  Description of Artificial Sequence: Synthetic polynucleotide
acaccggtgactccaggtttactacgctgcagattaagcgatttccgtgaggcgatttaaattataatccaatgaccatctaccaaaaatggattctcccattgaactctcattttctcccttcgtgccaacttaatcgtgaaatcagcactcctaatagtcaaatcatacccacaatcattaattttacggatggtgaatattttactaaattcataactaaaaaatttcggaagtagaatttcgattggataacaatc

SEQ ID NO: 1680 - DNA, 260 bp, Artificial Sequence
  Description of Artificial Sequence: Synthetic polynucleotide
aggcaggctgctgagttcaccgcgttgtcgaagaagttccgtcggctggaggcgtcgtgatgtgtgtatgtggacacaaccggtcctggcaccgctactcgtgggacaagttccggcaggtgtgggacaccggatgcaacgccaccaactatcacggtcctgctgggcatgaacgctgccgctgctccaaataccaagacaaggaagacgaatgatcactgatacgagggtcatcactgcgagggacgacgcgaaagccg

SEQ ID NO: 1681 - DNA, 260 bp, Artificial Sequence
  Description of Artificial Sequence: Synthetic polynucleotide
aagcaggctgctgagttcacagctctggtcaagaagttccgctggttggaggcttcgtgatgtgcgtgtgtggccataaccggtctttccaccgctaccagtgggacaagttccggggacggtgggacacgggttgtgaagccaccaactatcacggccctgctgggcatgaacgctgccgctgctccaaataccaagacaaggaagacgaatgatcactgatacgagggtcatcactgcgagggatgacgcgaaagccg

SEQ ID NO: 1682 - DNA, 260 bp, Artificial Sequence
  Description of Artificial Sequence: Synthetic polynucleotide
ggtctcgtcgcggcggtactggacgacgcggacgagaccggggggcgcgccgatggctgagccccgccgcttcaccgaagccgagatgctggcggccgcggcccgcgccatgggcaagatcgacgcccggggccggcttggcacgtcccgcatcagttacgaggagatcgaggccatggcggccacgctcctcgccctcggggtcgttccgatcccgcccacggccccggcgcccgaccggagcccctattccccgatca

SEQ ID NO: 1683 - DNA, 260 bp, Artificial Sequence
  Description of Artificial Sequence: Synthetic polynucleotide
aggcaggctgctgagttcaccgcgttgctgaagaagttccgccggctggaggcgtcgtgatgtgcaggtgtggtcacaaccggtcctggcacaggtatgcgtgggatcggttccgccaagtgtgggacaccagttgtgaagccaccaactatcacggccctgctgggcatgaacgctgccgctgctccaaataccaagacaaggaagacgaatgatcactgatacgagggtcatcactgcgagggatgacgcgaaagccg

SEQ ID NO: 1684 - DNA, 260 bp, Artificial Sequence
  Description of Artificial Sequence: Synthetic polynucleotide
aagcaggctgctgagttcagagctctggtcaagaagttccgctggttggaggcttcgtgatgtgcgtgtgtggccataaccggtcccggcaccgctaccagtgggacaagttccggggacggtgggacacgggttgtgacgccaccaactaccacggcccggccgggcatgaacgctgccactgctccgaatatcgagacaaggacgaaaactgatggttgttgatacacgggtgattaccgcgagggatgacgcgaaag

SEQ ID NO: 1685 - DNA, 260 bp, Artificial Sequence
  Description of Artificial Sequence: Synthetic polynucleotide
aggcaggctgctgagttcaccgcgttgctgaagaagttccgtcggctggaggcgtcgtgatgtgcaggtgtgggcacaaccggtcctggcacaggtatgcgtgggatcggttccgccaagtgtgggacaccagttgtgaagccaccaactatcacggccccgccgggcatgaacgctgccactgctccaaatatcaagacaaggacgaaacatgatcatcgatacgaaatcccaggcggatatgcggccgatctggcagc

SEQ ID NO: 1686 - DNA, 260 bp, Artificial Sequence
  Description of Artificial Sequence: Synthetic polynucleotide
aagcaggctgctgagttcagagctctggtcaagaagttccgctggttggaggcctcgtgatgtgcgtgtgtggacacaacaggtcccggcaccgctaccagtgggacaagttccggggacggtgggacacgggttgtgacgccaccaactaccacggccccgccggacatgaacgctgccactgctccgaatatcgagacaaggacgaaaactgatggttgttgatacacgggtgattaccgcgagggatgacgcgaaag

SEQ ID NO: 1687 - DNA, 260 bp, Artificial Sequence
  Description of Artificial Sequence: Synthetic polynucleotide
atagaaatagaacaaaaaccagttagaagaatagggtttcttattgaagagaatgaataattctcttttctttttgtagttctttattaatttatactatgttaaaaaaatgaatattttgttaaaactatgtgactaaatatatattatttattatctcaattttacagttcaagctagaaaatacatcaaaaaaaagatagttgaaaaataaaaataaaaaaattaaaaataactgttataaaaagtgatagttatgt

SEQ ID NO: 1688 - DNA, 260 bp, Artificial Sequence
  Description of Artificial Sequence: Synthetic polynucleotide
aagcaggctgctgagttcagagctctggtcaagaagttccgctggttggaggcgtcgtgatgtgcgtgtgtggccataaccggtctttccaccgctaccagtgggacaagttccggggacggtgggacacgggttgtgacgccaccaactaccacggccccgccggacatgaacgctgccactgctccgaatatcgagacaaggacgaaaactgatggttgttgatacacgggtgattaccgcgagggacgacgcgaaag

SEQ ID NO: 1689 - DNA, 260 bp, Artificial Sequence
  Description of Artificial Sequence: Synthetic polynucleotide
aggcaggctgctgagttcaccgcgttgctgaagaagttccgtcggctggaggcgtcgtgatgtgcaggtgtgggcacaaccggtcctggcacaggtatgcgtgggatcggttccgtcaagtgtgggacaccagttgtgaagccaccaactatcacggccctgctgggcatgaacgctgccgctgctccaaataccaagacaaggaagacgaatgatcactgatacgagggtcatcactgcgagggatgacgcgaaagccg

SEQ ID NO: 1690 - DNA, 260 bp, Artificial Sequence
  Description of Artificial Sequence: Synthetic polynucleotide
aggcaggctgctgagttcaccgcgttgctgaagaagttccgtcggctggaggcgtcgtgatgtgcaggtgtgggcacaaccggtcctggcacaggtatgcgtgggatcggttccgccaagtgtgggacaccagttgtgaagccaccaactatcacggccctgctgggcatgaacgctgccgctgctccaaataccaagacaaggaagacgaatgatcactgatacgagggtcatcactgcgagggatgacgcgaaagccg

SEQ ID NO: 1691 - DNA, 260 bp, Artificial Sequence
  Description of Artificial Sequence: Synthetic polynucleotide
aagcagatcgccgaatatcagtcgttgatggtgcggttccgccggctggaggcgtcgtgatgtgcaggtgtgggcacaaccggtcctggcacaggtatgcgtgggatcggttccgccaagtgtgggacaccagttgtgaagccaccaactatcacggccctgctgggcatgaacgctgccgttgctccaaataccaagacaaggaagacgaatgatcactgatacgagggtcatcactgcgagggatgacgcgaaagccg

SEQ ID NO: 1692 - DNA, 260 bp, Artificial Sequence
  Description of Artificial Sequence: Synthetic polynucleotide
aagcagatcgccgaatatcagtcgttgatggtgcggttccgccggctggaggcgtcgtgatgtgcaggtgtgggcacaaccggtcctggcacaggtatgcgtgggatcggttccgccaagtgtgggacaccagttgtgaagccaccaactatcacggccctgccgggcatgaacgctgccgctgctccaaataccaagacaaggaagacgaatgatcactgatacgagggtcatcactgcgagggatgacgcgaaagccg

SEQ ID NO: 1693 - DNA, 260 bp, Artificial Sequence
  Description of Artificial Sequence: Synthetic polynucleotide
aagcaggctgctgagttcagagctctggtcaagaagttccgctggttggaggcttcgtgatgtgcgtgtgtgggcacaaccggtctttccaccgctaccagtgggacaagttccgcggcaggtgggacacgggttgtgacgccaccaactaccacggccccgtcgggcatgaacgctgccgctgctcgaaataccaagacaaggaagacgaatgatcactgatacgagggtcatcactgcgagggatgacgcgaaagccg

SEQ ID NO: 1694 - DNA, 260 bp, Artificial Sequence
  Description of Artificial Sequence: Synthetic polynucleotide
aagcaggctgccgagttcacagctctggtcaagaagttccgctggttgggggcttcgtgatgtgcgtgtgtggccataaccggtctttccaccgctaccagtgggacaagtttcgcggcaggtgggacacgggttgtgacgccaccaactaccacggcccagccgggcatgaacgctgccactgctccgaatatcgagacaaggacgaaaactgatggttgttgatacacgggtgattaccgcgagggacgacgcgaaag

SEQ ID NO: 1695 - DNA, 260 bp, Artificial Sequence
  Description of Artificial Sequence: Synthetic polynucleotide
aggcaggctgctgagttcaccgcgttgtcgaagaagttccgtcggctggaggcgtcgtgatgtgtgtatgtggacacaaccggtcctggcaccgctactcgtgggacaagttccggcaggtgtgggacaccggatgcaacgccaccaactaccacggccccgtcgggcatgaacgctgccgctgctcgaaatatcaagacaaggaagacgaatgatcactgatacgagggtcatcactgcgagggatgacgcgaaagccg

SEQ ID NO: 1696 - DNA, 260 bp, Artificial Sequence
  Description of Artificial Sequence: Synthetic polynucleotide
aagcaggctgccgagttcacagctctggtcaagaagttccgctggttggaggcttcgtgatgtgcgtgtgtggccataaccggtctttccaccgctaccagtgggacaagttccgcggcaggtgggacacgggttgtgacgccaccaactatcacggccccgccgggcatgaacgctgccactgctccgaatatcgagacaaggacgaaaactgatggttgttgatacacgggtgattaccgcgagggacgacgcgaaag

SEQ ID NO: 1697 - DNA, 260 bp, Artificial Sequence
  Description of Artificial Sequence: Synthetic polynucleotide
ctctccgagtgcggacggtggggccgattccttgaccgaacccgagagaggtccgcatgacactcgacgcccccgagatccctgacggacagcccacgtgggcgcgtgtgcggcacggcgcaggatgcgccctgccgcgccgcctggacgacggcacgatcggcgtcctgccgaccaccgtcccgatccgcctcgagttcgaccgctacgacaccgggcccgacggcacccgccgccaggtgtggatcgtccctgacggc

SEQ ID NO: 1698 - DNA, 260 bp, Artificial Sequence
  Description of Artificial Sequence: Synthetic polynucleotide
actcgcaagcagatcgacgagtggcgccgcgagcgccggctgtgggcggacgcgtcatgaactcgatcaactcgacggtgttcgtgcctggtcacaaccagttgaagcggtgccgcggctgctcggcgctcatcttcttcgccgtgacccgcgacggccggtcgatcccggtcgaccacaagccgcgccccgacgggaatctcgcggtcgcgccgctgcaggacggcgagaaggcgccacgcgcgaccgtcgtccgaccc

SEQ ID NO: 1699 - DNA, 260 bp, Artificial Sequence
  Description of Artificial Sequence: Synthetic polynucleotide
acccgcaagcagatcgacgagtggcgccgcgaggtccggctgtgggtggacgcgtcatgaactcgatcaactcgacggtgttcgtgcctggccacaaccagttgaagcggtgccgcggctgctcggcactcatcttcttcgccgtcacccgcgacggccggtcgatcccggtcgaccacaaaccccgtcccgacggcaacctcgcggtcgcgccgctgcaggacggcgagaaggcgccccgcgcgaccgtcatccgcccc

SEQ ID NO: 1700 - DNA, 260 bp, Artificial Sequence
  Description of Artificial Sequence: Synthetic polynucleotide
acccgcaagcagatcgacgagtggcgccgcgaggtccgactgtgggcggacgcgtcatgaactcaatcaactcgacggtgttcgtgcccggacacaaccagttgaagcggtgccgcggctgctcggcactcatcttcttcgccgtcacccgcgacggccggtcgatcccggtcgaccacaaaccgcgccccgacgggaacctcgcgatcgccccgctgcaggacggcgagaaggcgccacgcgcgaccgtcatccgacct

SEQ ID NO: 1701 - DNA, 260 bp, Artificial Sequence
  Description of Artificial Sequence: Synthetic polynucleotide
acccgcaagcagatcgacgagtggcgccgcgaggtccggctgtgggtggacgcgtcatgaactcgatcaactcgacggtgttcgtgcctggccacaaccagttgaagcggtgccgcggctgctcggcactcatcttcttcgccgtcacccgcgacggccggtcaatcccggtcgaccacaaacccgccgcggacggaaacctcgcggtcgcgccgctccaggacggcgagaaggcgccccgcgcgaccgtcatccgaccc

SEQ ID NO: 1702 - DNA, 260 bp, Artificial Sequence
  Description of Artificial Sequence: Synthetic polynucleotide
accacggcatccggccggacaccttcgacccggccgacaggatcatccaggccccgcgcgccgtctgcaggttcaccgcccgccgccagcgctacggaatcagccactagacagcaatagggcccctgaccgtcccaagtcaggggccctaccagccaccagcacaacccgcatactcagaatagaggaggacagagaaaatgaccagatggctacagatcaaagacgattatctcgagctccacgccgaagggatcacc

SEQ ID NO: 1703 - DNA, 260 bp, Artificial Sequence
  Description of Artificial Sequence: Synthetic polynucleotide
acccgcaagcagatcgacgagtggcgccgcgaggtccggctgtgggtggacgcgtcatgaactcgatcaactcgacggtgttcgtgcccgggcacaaccagttgaagcggtgccgcggctgctcggcgctcatcttcttcgccgtgacccgcgacggccggtcgatcccggtcgaccacaaaccgcgtcccgacggcaacctcgcggtcgcccctctgcaggacggcgagaaggcgccccgcgcgaccgtcatccgaccc

SEQ ID NO: 1704 - DNA, 260 bp, Artificial Sequence
  Description of Artificial Sequence: Synthetic polynucleotide
acccgcaagcagatcgacgaatggcgccgcgaacgccgactgtgggcggccgcgtcatgaactcgatcaacgcgacggtgttcgtgcccggccacaaccagttgaagcggtgccgcggttgctcggagctcatcttcttcgccgtgacccgcgacggccggtcgatcccggtcgaccacaaggcccgcgccgacgggaacctcgcgatcgccccgctgcaggacggcgagaaggcgccgcgcgcgaccgtcgtccgacct

SEQ ID NO: 1705 - DNA, 260 bp, Artificial Sequence
  Description of Artificial Sequence: Synthetic polynucleotide
acccgcaagcagatcgacgagtggcgccgcgaggtccggctgtgggtggacgcgtcatgaactcgatcaactcgacggtgttcgtccccgggcacaaccagttgaagcgctgccgcggctgctcggcactcatcttcttcgccgtcacccgcgacggccggtcgatcccggtcgaccacaaaccgcgtcccgacggcaacctcgcgatcgccccgctgcaggacggcgagaaggcgccacgcgcgaccgtcatccgaccc

SEQ ID NO: 1706 - DNA, 260 bp, Artificial Sequence
  Description of Artificial Sequence: Synthetic polynucleotide
ctggcggcgttgcacgtcgagcaggagaaacggtacctcctcgccgaagtggatcggctctgccagggcctgggcatcgagcatccagaacaggcggccggcctggaacagctgccgaaaggatggcggcggcagcgtccaatcctcaaggccctggtggaaacgctccaggcggccgcagatagcaagcggaggtaataatgaaggagatccgttcgcagcagatccgccgccggaacaacatgctcagcgagctggcc

SEQ ID NO: 1707 - DNA, 260 bp, Artificial Sequence
  Description of Artificial Sequence: Synthetic polynucleotide
ctggcagcgctgcacgtcgagcaggagaaacggtacctcctcgccgaggtggatcggctctgccagggcctgggcattgagcatccagaacaggcggccggcttggaacagttgccgaaaggatggcggcggcagcgtccaatcctcaaggccctggtggaaacgctccaggcggccgcagatagcaagcggaggtaataatgaaggagatccgttcgcagcagatccgccgccggaacaacatgctcagcgagctggcc

SEQ ID NO: 1708 - DNA, 260 bp, Artificial Sequence
  Description of Artificial Sequence: Synthetic polynucleotide
gatcgtaaacagtgcgctgagtggcggtccatcatccgcatggaaagggccatcgcatgactgacttgtcgtttctgctagctcccgcagaagaggggcggcatgcgtggcgggacaaagcgttgtgcgcccaggttgatgtgggggacatgtttttccccggtaagggggagagcgcgaagccggcgaagaggatttgcgcccggtgtgaggtgcgggccgaatgcttggagttcgcgttggcgaatcgtgagcactat

SEQ ID NO: 1709 - DNA, 260 bp, Artificial Sequence
  Description of Artificial Sequence: Synthetic polynucleotide
caagtggaaatttcagaaacaccattgttcgttgatgatatcggtgatgatgatggttaagaaaaaactatcagaattattaccgaaaaaatttcattcggtatggagagcaactcttaactcggacatactgaatattgtttgtaagggtggacgtggttctggtaaatcatcagatattgcacatattattactcaattgcttatgagatatgctgtcaatgcggttggcattcgatatgttgataatacattagaac

SEQ ID NO: 1710 - DNA, 260 bp, Artificial Sequence
  Description of Artificial Sequence: Synthetic polynucleotide
gaccgccggcagtgcgctgaatggcgagtgatcgcccgcatggaaagagctatcgcatgaccatcatcgacctgtcattcatgctcgcccctgttgaggacaagcacgcgtggcgtgaccaagcgttgtgctcccaggtcgatcccgagctgttcttccccgaaaagggagtaaacgcgaaacccgcaaagcggatctgcggtatgtgcgacgtccgggacgaatgccttcagtgggcgctggacaacaacgaacagttc

SEQ ID NO: 1711 - DNA, 260 bp, Artificial Sequence
  Description of Artificial Sequence: Synthetic polynucleotide
gaccgccggcagtgcgctgaatggcgagtgatcgcccgcatggaaagagctatcgcatgaccatcatcgacctgtcattcatgctcgcccctgttgaggacaagcacgcgtggcgtgaccaagcgttgtgctcccaggtcgatcccgagctgttcttccccgaaaagggaggaaacgcgaaacccgcaaagcggatctgcggtatttgcgacgtccgggacgaatgccttcagtgggcgctggacaacaacgaacagttc

SEQ ID NO: 1712 - DNA, 260 bp, Artificial Sequence
  Description of Artificial Sequence: Synthetic polynucleotide
gaccgccggcagtgcgctgaatggcgagtgatcgcccgcatggaaagagctatcgcatgaccatcatcgacctgtcattcatgctcgcccatgttgaggacaagcacgcgtggcgtgaccaagcgttgtgctcccaggtcgatcccgagctgttcttccccgaaaagggaggaaacgcgaaacccgcaaagcggatctgcggtatgtgcgacgtccgggacgaatgccttcagtgggcgctggacaacaacgaacagttc

SEQ ID NO: 1713 - DNA, 260 bp, Artificial Sequence
  Description of Artificial Sequence: Synthetic polynucleotide
gatcgtaaacagtgcgctgagtggcggtccatcatccgaatggaaagggccatcgcatgaccctgacagatttgaccctcaagctcgccgcagcagtggaggaaaagcatgcgtggagagacctggcacggtgcgccgaagtggaccccgaaatgttcttccccgagaagggtggcagcgcgaagccagccaaacggatctgcagccggtgcgaagtcgcggatgagtgcctggagtgggctctggcgaatcgcgagaac

SEQ ID NO: 1714 - DNA, 260 bp, Artificial Sequence
  Description of Artificial Sequence: Synthetic polynucleotide
gatcgtaaacagtgcgctgagtggcggtccatcatccgcatggaaagggccatcgcatgaccctgacagatttgaccctcaagctcgccgcagcagtggaggaaaagcatgcgtggagagacctggcacggtgcgccgaagtggaccccgaaatgttcttccctgagaagggtggaagcgcgaagccagccaaacggatctgcagccggtgcgaagtcgcggatgagtgcctggagtgggctctggcgaatcgcgagaac

SEQ ID NO: 1715 - DNA, 260 bp, Artificial Sequence
  Description of Artificial Sequence: Synthetic polynucleotide
tattgtgtaaaaatgtgtggtaaagaacgttgtggccatgcattatcatctcctagaaatccttacaatagatattgttttgtagattctgaaggatggattttagaacctggaatccaagaagaagcttgtatatatatgtgttaatattggactaacataaaaattgaatattttaattataaatagtgtcaattaaaatgacaccaaatattattattatcgttgataataaaatggaaaatactaatgcactggaa

SEQ ID NO: 1716 - DNA, 260 bp, Artificial Sequence
  Description of Artificial Sequence: Synthetic polynucleotide
tattgtgtaaaaatgtgtggtaaagaacattgtagccatgcattatcatctcctagaaatccttataatagatattgttttgtagattctgaaggatggattttagaacctggaatccaagaagaagcttgtatatatatgtgttaatattggactaacataaaaattgaatattttaattataaatagtgtcaattaaaatgacaccaaatattattattatcgttgataataaaatggaaaatactaatgcactggaa

SEQ ID NO: 1717 - DNA, 260 bp, Artificial Sequence
  Description of Artificial Sequence: Synthetic polynucleotide
caatattgtgtaaaaatgtgtggtaaagaacattgtagccatgcattatcatctcctagaaatccttataatagatattgttttgtagattctgaaggatggattttagaacctggaattcaagaagaatcttgtatgtatatgtgttagagctatcaaaaaaaatttgaatattttaattataaatagtgtcaattaaaatgacaccaaatattattattatcgttgataataaaatggaaaatactaatgcactggaa

SEQ ID NO: 1718 - DNA, 260 bp, Artificial Sequence
  Description of Artificial Sequence: Synthetic polynucleotide
acccgtgagcagtccatcgagtgggtttcgttcctccgccgctatcggggtgtcgcatgaccacctggaagaaactcaccccggagcagatcgaacggatcgtgtcgttgacgtgggacggatggtctatcgaacagatcgccaccgacattgggtgcacgtcgcgcacggtgacccgggtgagggggaaacacaacatcacccgtgggcgtgctttggatccgatccctgttgaaaagttggctgtcgctgcacgtctc

SEQ ID NO: 1719 - DNA, 260 bp, Artificial Sequence
  Description of Artificial Sequence: Synthetic polynucleotide
actcgtgagcagtcgattgagtggatttcgttcatccgccgctacaggggtgtcgcatgaggcggggcgcgaaactcccggagtgggtggtggagcggatcgtggcgttgtcgtggaacggctggaccaccggcgacatcgccaaagaagtcggatgctccgaccgcacagtgtcacgggtgagggtgcggcacggcatcagccgcggcgaagcccacgaccccatccctgaacatgtcctggcccaggcggcccgcctg

SEQ ID NO: 1720 - DNA, 260 bp, Artificial Sequence
  Description of Artificial Sequence: Synthetic polynucleotide
actcgtgagcagtcgattgagtggatttcgttcatccgccgctacaggggtgtcgcatgaggcggggcgcgaaactcccggagtgggtggtggagcggatcgtggcgttgtcgtggaacggttggaccaccggcgacatcgccaaagaagtcggatgctccgaccgcacagtgtcacgggtgagggtgcggcacggcatcagccgcggcgaagcccacgaccccatccctgaacatgtcctggcccaggcggcccgcctg

SEQ ID NO: 1721 - DNA, 260 bp, Artificial Sequence
  Description of Artificial Sequence: Synthetic polynucleotide
actcgtgagcagtcgattgagtggatttcgttcatccgccgctacaggggtgtcgcatgaggcggggcgcgaaactcccggagtgggtggtggagcggatcgtggcgttgtcgtggaacggttggaccaccggcgacatcgccaaagaagtcggatgctccgaccgcacagtgtcacgggtgagagtgcggcacggcatcagccgcggcgaagcccacgaccccatccctgaacatgtcctggcccaggcggcccgcctg

SEQ ID NO: 1722 - DNA, 260 bp, Artificial Sequence
  Description of Artificial Sequence: Synthetic polynucleotide
actcgtgagcagtcgattgagtggatttcgttcattcgccgctacaggggtgtggcatgaggcggggcgcgaaactcccggagtgggtggtggagcggatcgtggcgttgtcgtggaacggttggaccaccggcgacatcgccaaagaagtcggatgttccgaccgcacagtgtcacgggtgagggtgcggcacggcatctcccgcggcgaagcccacgaccccatccctgaacatgtcctggcccaggcggcccgcctg

SEQ ID NO: 1723 - DNA, 260 bp, Artificial Sequence
  Description of Artificial Sequence: Synthetic polynucleotide
actcgtgagcagtcgattgagtggatttcgttcatccgccgctacaggggtgtcgcatgaggcggggcgcgaaactcccggagtgggtggtggagcggatcgtggcgttgtcgtggaacggctggaccaccggcgacatcgccaaagaagtcggatgctccgaccgcacagtgtctcgggtgagggttcggcacggcatctcccgcggcgaagcccacgaccccatccctgaacatgtcctggcccaggcggcccgcctg

SEQ ID NO: 1724 - DNA, 260 bp, Artificial Sequence
  Description of Artificial Sequence: Synthetic polynucleotide
tgccatttccttggagatttttacttgtgatttagtcattggaatcagtcctgttaaggctccccaccacaatggctaaaaggtacaggacagaccggggagcacgttaagtataaccacttcaaaataattaaacaaatggcttgattttacccgattcagtgactaagattaattcaacttaaacaggaaggataatcatgaaattcaccgacacaccaacaaccacgcttgatgagttacttaactcaacgcgtggc

SEQ ID NO: 1725 - DNA, 260 bp, Artificial Sequence
  Description of Artificial Sequence: Synthetic polynucleotide
agagaagataagggttatggttatattgaaaagttattagcaatagttaaagagagtcgacagaagaatgaggaaactatgaaaagatacaacacaataaaaaaattgatcttttgatagtctgttatatccttttcatatctattgtgattgataagtaaagtgaccctttttaactataactttttataataaaattcatgtcgaaatccattttttctaaggagatggatgcatttgccattgatattctgattaga

SEQ ID NO: 1726 - DNA, 260 bp, Artificial Sequence
  Description of Artificial Sequence: Synthetic polynucleotide
tatgatgtggctgtttccacgctttataagaagtttccggcgtcatcatttcaatcctaaaccttggtttaagagaactcggtaccagcggtgaaaagatccccctgttgagcacggctaacacatggagttcacgccagactttcaacggcgggatcaccggggcgctggcagggaatgccgatactgcaacgaaattgaaaaccaaaaggtcgcttcaagttgacctccaaagtgataacgccatcgactttgatggt

SEQ ID NO: 1727 - DNA, 260 bp, Artificial Sequence
  Description of Artificial Sequence: Synthetic polynucleotide
acggtggcactttctgcatctcatgccttgaaaatggaagctctccagagtttagcatagccaaaagaaaatgattaaatttacagcgcaggagcgggagatgcaaatctcccatctgtgtaaggatagcctttactctttttctgggtgggatggtccttacaagtttggcaaatcaaaagtgctcatctcctgtaaaaagcatggttgtcattctttgcatctaaatagtgttctacacaatggttcaagatgtccgg

SEQ ID NO: 1728 - DNA, 260 bp, Artificial Sequence
  Description of Artificial Sequence: Synthetic polynucleotide
cttctaaatgggatactcaaagaagagaaggaagttgaaagcaatatcccacaatggcagacggacgcccttaaaactttagtgaagatgggagtcatcacagatgaagcctactggtctaaaaagatggaagacaaaattactgtcggtgaggtcatcggattactcggtaaaatgactaagtaaatggaggggtgtcgatggatacgtttgaaagtgaacttacacttgatatgataagtgaagggatgtaccgtgac

SEQ ID NO: 1729 - DNA, 260 bp, Artificial Sequence
  Description of Artificial Sequence: Synthetic polynucleotide
ggtgatgcggaacaaaagacaccgaatccgcagtcagacgcagacgagtacaagaaatgaaacaggtagaaatcaaaccaatcaaagagacgagcgacgattacgaggagctggtcgaaatcatttcggattacttcaaagaggaaatctatttgcctcttttgaaaatcattgatgctccgaaatcggttttgaattctcgcgaggatttgatttctgcaatttcttctggacgtatcacttattatcgcggagagttt

SEQ ID NO: 1730 - DNA, 260 bp, Artificial Sequence
  Description of Artificial Sequence: Synthetic polynucleotide
ctggagggacagatgagccttctcgactacggcgacgagccggaaaacactacgttctaagacaacatttctaagaagcagtacatatataaggttcctgaaagggacggtaaaataagactatgagcatagctcatagtcttatttttatatccaaaggaggacaccaaacatgagcatggagatcatccagagcgcggcgaccgagctgctggtcaacgttgcgctcgccgtgctggccctcgccggggcctacgcgg

SEQ ID NO: 1731 - DNA, 260 bp, Artificial Sequence
  Description of Artificial Sequence: Synthetic polynucleotide
ggatccaacgcgcgcttgatccgatagaaaaccgagacgccagggttgtaccaggtcgaatcctcaccgagacgtgtaaacccagcgagcgagttggaactcatactctgcgcaaccaacccgaccacgggccttgaccccgcgggttggacacgcttgatcctggtctcagaccagggaaagcgagaagatctaacccgatggcaaagaaaaattactccgaagagttccgccgcgacgcagtcgagctgtaccgcgac

SEQ ID NO: 1732 - DNA, 260 bp, Artificial Sequence
  Description of Artificial Sequence: Synthetic polynucleotide
cgtagatcacgagataataagaaaaatatattggataatcaaccggaaattaatatgtaatatattggaaaaattgataaatttatttattataaaattataacaaataaataataatattattaaccaaatggaatgttatgaatgtggtaatatgagtactaacattgtattatattataatatcaaacttaaaatatatatcggatcagaaaattataataataataatcatcaaaattttaaaccaatttgtgaaa

SEQ ID NO: 1733 - DNA, 260 bp, Artificial Sequence
  Description of Artificial Sequence: Synthetic polynucleotide
tatcgcacgtaataaccgctttgtctacttgtttccagagatgtatgctaacatcggaaatataaaaatggtagaactcggatacgggcatagcgtacaaaaggtcttttattacgacccaaacacgtgtgcatattgtttgtttacgttcaccaataaaagtaacatcgtgaatctattcgaagctaaaaggtaagaaaatgggtaaacgttggacagataaagaagatgaaacgttgctgcttattcttagtacatca

SEQ ID NO: 1734 - DNA, 260 bp, Artificial Sequence
  Description of Artificial Sequence: Synthetic polynucleotide
ataaaataccacaatttgaaggatttttcaaagtatacttgaatcaattatcagaaaaaaattatcacgaatattgttttacagataatgaaggatatattttacaaccaggtatcaaaagagaatatattaattaaaaaaattgaaattttaaagattaaaattgtttattaatcctattttattattatagctccatcatggagaaagttattattatttatcatgagcatttgaattcttttgaagaatctgcagtc

SEQ ID NO: 1735 - DNA, 260 bp, Artificial Sequence
  Description of Artificial Sequence: Synthetic polynucleotide
ccatgcattggcatctcctagaaatccttacaatagatattgttatgttgattctgaaggatggattttggaacctggtatacaagaagaagcttgtatgtatatgtgttaatattggactagcataaaaattgaatattttaatcataaataatatcatttgaaaatgttttattatcaatattattattgataataaaatggaaaatcctacaacgctagaaattaatgccgctattatattggttaaattgcgtcgt

SEQ ID NO: 1736 - DNA, 260 bp, Artificial Sequence
  Description of Artificial Sequence: Synthetic polynucleotide
aggaaacaaattaatacttggtttcaaaataaacgctcatacggcaaacaacaaaaatgagcagtaaaaaattgattattatatgttaatatatatattgacatattataaaaaatcattaaacatatcataataaaatggaatgttattattgtgaaactaataaaaataatatatgtttttattatggtcttaaacctattgtttatttagaaagtaaacattataatccacaaattcataaaaattataaaccgata

SEQ ID NO: 1737 - DNA, 260 bp, Artificial Sequence
  Description of Artificial Sequence: Synthetic polynucleotide
gctttaaggcgagttttcgaatcttaagtttatctttctgtttctgctcctctcgtcgtcgtttcttctctgctgccttttccgctttttcgcgttctttgcttcgtcgttcgagtgctatcttggtttgaagtggcacactgaatttggccacctgaacagaggtgatatgctcacctcagaacaacacaggtgctccaatgaaaaaaagaaattttagcgcagagtttaaacgcgaatccgctcaactggttgttgac

SEQ ID NO: 1738 - DNA, 260 bp, Artificial Sequence
  Description of Artificial Sequence: Synthetic polynucleotide
gttcgaacgatactaaatgaatatgctttggatcagaaccagctcgcgttgtttgactaacgcgagcttatttattgcaagcgactattttacctcggtgtttcaaggaaaaaatgaatattatgcgtatgtaggaaaatttttctatgggttaagcttctgtcagatagtaatgacaggagcttttttattttgcttgattagggggtggaatcagttggaatgggaacaagcatttaacatcatcatcatgacgatga

SEQ ID NO: 1739 - DNA, 260 bp, Artificial Sequence
  Description of Artificial Sequence: Synthetic polynucleotide
aatgcggctttctacgatcaaaatcgtagacagtttagccccggatgcactcgtactcattctcaactggcgctagcacaaggttttaccactcccattaattaaattttttaatcacataaaatttttcatgtaattaaaaaaaaattgatttttgaatgattaaaataacacatttattaaaatttaataataatacaatgaataaaatcattattatatattgcaatcattttgattcttttgaagaatcggttgtc

SEQ ID NO: 1740 - DNA, 260 bp, Artificial Sequence
  Description of Artificial Sequence: Synthetic polynucleotide
ttatgaaagattgggtttacttctacattgagcatactattaaatatggtaagccgtatcgacaaagaaggaattaaatataagaagtgcggtgtagtgctgacctgtttagagccaaagtatggacatacttatgatgtgtgctgaaaaaacaggaggttttaacttggtaaactaaacacactcatcaggagtttaccatgagcaagaaacacaagacttacaccacagaatttaaagctgaagccatcaaattaatt

SEQ ID NO: 1741 - DNA, 260 bp, Artificial Sequence
  Description of Artificial Sequence: Synthetic polynucleotide
gccaaccccaaggcaggtattaccgcgcatctctagtgtcatcttaaccccttccgggtaagaataattaccgcccaatactacaacctggctgacggggtactggctggaattattgttaaaattagagttaataatgaatcgccacaggtttaacagacacctcagagtcatttaagatgacttaaagagaggtgcccatgagcggtaagcgttatcccgaagagtttaaaattgaagcggtaaaacaggttgttgat

SEQ ID NO: 1742 - DNA, 260 bp, Artificial Sequence
  Description of Artificial Sequence: Synthetic polynucleotide
gaaataacgccggatgagcagaaagaacctgtggcggccattgcgccgtctttatattagcgccagcgtatcagttccgacaaaacaatctcaatccatcccaataattagcagggagaacaatcgaaaaagcgcaagagaaagaaggattacttgtttttttaggaatgaaatccgttaatgactatactcttaatattcttggccaaaatgtttcaagagtcacaacggggaaaaaaccgtatgatttattattcctg

SEQ ID NO: 1743 - DNA, 260 bp, Artificial Sequence
  Description of Artificial Sequence: Synthetic polynucleotide
atcaacttcgctgatggccgattcgcaatgatgcgcggcgagccgatgctcgacgcctccgacggagtcctgacgatcgcactcgatgacggcacgttccggacgtgcaacttcgaccacgtcgtctactacaccaccctcaccgaggacgacctcaagcacctcttcggtgatgacgaggaagaaggagccggatacctgtgaacgcaacagaactactggatcagctccgcgagaaggtcgaagccctcgaggaggag

SEQ ID NO: 1744 - DNA, 260 bp, Artificial Sequence
  Description of Artificial Sequence: Synthetic polynucleotide
aaaaaatacaatgagatatgtggtcttctaaatcaggcgataaaacaaatgccagaatagattagcaaatcatcggattttgttacgacaaattaatgaaaaaaaagatggtagttattacttgcgaagatctcgctaaaatgcttttagagcttcctgattctgcaaaacccaaagatatagaatcaaaattgtttaatcaaaaaggtatcgaaaaaaaccagacggccaagtacatccacagctgtgtttgcaaaatg

SEQ ID NO: 1745 - DNA, 260 bp, Artificial Sequence
  Description of Artificial Sequence: Synthetic polynucleotide
gaaatgcaattagatatcctaaagcaagcggcggtgattatggcacaaaaagggaaataatcactgctaataaggataactatagcatttcagccatgtgtcgttggttgaacattcctcgttctagctattactacaaggctgttaaaccagtctctgaagcggaaacttgaagaaaatatcaaagctatttttctcgaaagtaaggccagatacggatccagaaaaatcaaaatatgcttgaataacgaaggtattac

SEQ ID NO: 1746 - DNA, 260 bp, Artificial Sequence
  Description of Artificial Sequence: Synthetic polynucleotide
gtatccgcttctgcgcttgcaaaatggatcaaacagtattctcaagtcagactcgaagataattctgtacttactgccaagcaaatacaagagttacaaaaacgtaatgcgcagcttgaagaggagaaccttgaatcggttacactaaactagacagaatttataaagtgttctacactaaagaaaacaggagaacagatatgtctagaaaaatacgtcgccacttcaccgatgattttaagcaacaaatcgttgacttg

SEQ ID NO: 1747 - DNA, 260 bp, Artificial Sequence
  Description of Artificial Sequence: Synthetic polynucleotide
tactggacgccccgggccaaggacgagcccaagatagaactgtccgaggatcagggctagtcacccccacgagcctgccgcagccagcggcaggctttccccttgcgccgatccttgcgcccaaggtaggctacctatcccgacacgccgacgtcgtacttccctaacccggggtagtacgatgttcgcatgagtgctacccccgaagcccccgcagttgccaccgagtccgagtggggcagcccgacgttcaaaacgtt

SEQ ID NO: 1748 - DNA, 260 bp, Artificial Sequence
  Description of Artificial Sequence: Synthetic polynucleotide
gcccggaaactagccttgtcccggcagcgggttagtgaaataattaagaagtttgcgtaacccactccctaacccgtctcccaagcgggttttttgattcctaaattctttcctcaaaccccttgacatcctaaaggaggtttgatatattagaagtatgaacttgaggagaacgtttatgtttatagttaaagaagggaacagaaagcacggtgttggctaccagatatgggaaggaaacttgttggtacgcgttggta

SEQ ID NO: 1749 - DNA, 260 bp, Artificial Sequence
  Description of Artificial Sequence: Synthetic polynucleotide
atcgctcaaggggcaccggaggcgttacgccgggaagcggtcgaactgctgttgaagtaatcaggggagcacaacaggatgatacaactacctccagcgttggaggctatgaaagccttcccgcaattcatgatttacaagctcgtaccgcgtcagggcacaccgggtaagatggacaagctgccgtgcagtctcgacggcaaacccgtgtcagcgcacgcctcagagcactgggttgacgctgacacagcttgtttcac

SEQ ID NO: 1750 - DNA, 260 bp, Artificial Sequence
  Description of Artificial Sequence: Synthetic polynucleotide
ttcaacaaaattttgtattttcctgaatttgacctctttccgtaatatttgtttttgtaaggggctttctaagaccccacctaatttaaaactccacaaaccttattttaattttacaaaaaaatggatgggctacactaagttggacagaaaaattaaggctagtagaataacatattattatagggaacggatctattatgccaagacaaagacgtacattcacagatgatttcaagagacaaatggtccaacttcac

SEQ ID NO: 1751 - DNA, 260 bp, Artificial Sequence
  Description of Artificial Sequence: Synthetic polynucleotide
aacgaaccaaaggtagatatccaagaggttatcgatgccattaataaagtccgactataagtttcgtatcctgttcaaatacgaacatgggtacaactacctaatggaagacaaagcctatttaatttttggtgtcatcaaataccaaggcgtcaagttatttatgcgtcgtccaaaggaaattcgcatcgaccctaactacccaattagtgtggatgaggaggctagagacttattcaagcaaatgtctttcgcttgtc

SEQ ID NO: 1752 - DNA, 260 bp, Artificial Sequence
  Description of Artificial Sequence: Synthetic polynucleotide
atccttcaactgagggattttgcttatgttaataaaaacgggtatatttattattgtaattaaattgaattgaatggaggctttctctcatgagcagaattaatgaagtaagagaatttattgaaaagctgatgctagtatagttccatggacacaacttagttaagtgttaaaatgttactaagaaaggttgtgtccatatgggaaacaaaaatacaggcaaaaaatataacgaagattttaaaaagatgatcgttgat

SEQ ID NO: 1753 - DNA, 260 bp, Artificial Sequence
  Description of Artificial Sequence: Synthetic polynucleotide
catgaagaacgtcgctgtgcgcgtccacctggacaacggactgatcgccgctgggaccggcgaggtcctgttcgagccctcggagggcgcggtctacgtcatgggcaacgacggtgctcacaccgtcttcaacttcgaccacatcacccactacgtcgtggtgccggtcgatgacgagaaggaacaggagggattccgaattggctgagacgccaacgcttctgagggttctcgatgagatcgaggacatcctcgcggag

SEQ ID NO: 1754 - DNA, 260 bp, Artificial Sequence
  Description of Artificial Sequence: Synthetic polynucleotide
ggaatccatgaagaacgtcgctgtgcgcgtccacctggacaacggactcatcgccgcaggaaccggcgaggtcatgttcgagccctcggagggcgcgatctacgtcatgggcaacgacggtgctcacaccgtcttcaacttcgcccacgtcacccactacgtcgtggttccggtcgatgaagagaaggaggggttccgaattggctgagacgccaacgcttctgagggtgctcgatgagatcgaggacatcctcgcagag

SEQ ID NO: 1755 - DNA, 260 bp, Artificial Sequence
  Description of Artificial Sequence: Synthetic polynucleotide
agaggaacacatgcagaactgcactgtccgcgtccacctggagaacggcttgatcgccatcggccagggggaggtcatcttccagcccgacgagggcgctctgtacgtgctcggtgacgacggtgcccacaccgtcttcaacttccggcacgtcagccactacgtgatcgtccccaacgacgagaaggaggggacctcaattggctgagaccccaacccttctcagggtcctcgacgagatcgaggacatcctcgcggag

SEQ ID NO: 1756 - DNA, 260 bp, Artificial Sequence
  Description of Artificial Sequence: Synthetic polynucleotide
aacacacatgcagaactccatcgtccgcgtcttcctggagagcggcctggtggccgtcggccagggcgaggtcatcctccagcccgatgagggcgctctgtacgtgatcggtgacgacggtgcccacaccgtcttcaacttccggcacgtcacccactacacgatcaccccgaacgaggagaagaacgaggagccctcaattggctgacacctcaacgcttctgaaggttctggatgagatcgagggtctcatcgaggag

SEQ ID NO: 1757 - DNA, 260 bp, Artificial Sequence
  Description of Artificial Sequence: Synthetic polynucleotide
ggaacacatcatgcagaacgcatcagtacgagtccacctggagaacggcctggtggctgttggctcgggtgaggtcatccttcagcccgacgagggcgctctgtacgtgctgggcgacgaaggcgctcacaccgtcttcaacttccggcacgtcacccactacgtcgtcgtcccgaaccaggacaaggagggcacctcaattggctgagacgccaaaccttctcagggttctggacgagatcgaggacatcctcgcggag

SEQ ID NO: 1758 - DNA, 260 bp, Artificial Sequence
  Description of Artificial Sequence: Synthetic polynucleotide
agaggaacacatgcagaactccactgtccgcgtccacctggagaacggcttgatcgccatcggccagggcgaggtcatcttccagcccgacgagggcgctctgtacgtgctcggtgacgacggtgcccacaccgtcttcaacttccggcacgtcagccactacgtgatcgtccccaacgacgagaaggagggaacctcaattggctgagacgccaacgcttctgagggttctcgatgagatcgaggacatcctcgcggag

SEQ ID NO: 1759 - DNA, 260 bp, Artificial Sequence
  Description of Artificial Sequence: Synthetic polynucleotide
tttacctttttcttcataacttccccaggtatcgttaattttgtggattgtgttatatcttgtcatttccttaacctcatactgttatttatataggaccaatagccctagtattgttgtctggatgtatactataaaagtagacaaaactttgtgtgttataatctattttaaaagacacaaaaacgaaaggacaacctatgtcaacatttaaacgctacgatgaagaatttaaacaatcccttgtcaacctttatcaa

SEQ ID NO: 1760 - DNA, 260 bp, Artificial Sequence
  Description of Artificial Sequence: Synthetic polynucleotide
aaaagacgaagaaagcagatagctctggaagcgtcatactcatatcacgggagaccttaaaaggctattgaagctcgccctatattcttgctgatactacgaggaggtgagaactatgggcgaaaattctaaacttaactggcgagtgcggtttgccaaccctacttggtgggtgttagcgggaatccctcagttgattcttattgttcagctgatcttaacttttgtaaacgattttgtttaccctacgggatatcaga

SEQ ID NO: 1761 - DNA, 260 bp, Artificial Sequence
  Description of Artificial Sequence: Synthetic polynucleotide
caggttacgttgatattgatcctattttatctactattagtgaatctatcaaaaaacaatatacaaatctccaaataccaatgaattaatttcatcaaataaaattgattttaaaatgtattagtagatctcaatatcattattaatgatactaagataattacttcatagtaaaaaatcttattagatagaaaattagtatgagatctttatattccacttgtgatgtaaaaatacctattcaaaaatggaaaaatact

SEQ ID NO: 1762 - DNA, 260 bp, Artificial Sequence
  Description of Artificial Sequence: Synthetic polynucleotide
caggttacgttgatattgatcctattttatctactattagtgaatctatcaaaaaacaatatacaaatctccaaataccaatgaattaatttcatcaaataaaattgattttaaaatgtattagtagatcttaatatcattattaatgatactaagataattacttcatagtaaaaaatcttattagatagaaaattagtatgagatctttatattccacttgtgatgtaaaaatacctattcaaaaatggaaaaatact

SEQ ID NO: 1763 - DNA, 260 bp, Artificial Sequence
  Description of Artificial Sequence: Synthetic polynucleotide
tgaagcggcacgagctgtcctgccgaacatgactaactcaccgatggtcgtcaccggcaatcaccgagcgtggcgcaacgtgatcaagcagcggtggcacacggcagcggacgccgagattcgggagctggcaggggagttgctgaagcagctacggcaggtcgctcccaacacctaccaggacatccccgaggagccgtatggctgacgtgcgggaggtagctgacctgctcaaccggctcaacgtcattgtgcgggag

SEQ ID NO: 1764 - DNA, 260 bp, Artificial Sequence
  Description of Artificial Sequence: Synthetic polynucleotide
tgaagcggcacgagccgttctcccgaacatgaccaactctccgatggtcgtcactggcaaccaccgtgcatggcgcaacgtgatcaagcagcgctggcacaaggcagcggacgccgagattcgggaactggccgggatgctcctccaggagctccggaagatcgcaccgaacacctaccaggacatccccgaggagccgtatggctgacgtgcgggaggtggcagatctgcttaataggttgaacaccattgtgcgggaa

SEQ ID NO: 1765 - DNA, 260 bp, Artificial Sequence
  Description of Artificial Sequence: Synthetic polynucleotide
tgaagcggcacgagctgtcctgccgaacatgaccaactcaccgatggtcgtcaccggcaatcaccgagcgtggcgcaacgtgatcaagcagcggtggcacacggcagcggacgccgagattcgggagctggcaggggagttgctgaagcagctacggcaggtcgctcccaacacctattccgatattccagaggagccgtatggctgacgtgcgggaggtagctgacctgctcaaccggctcaacgtcattgtgcgggag

SEQ ID NO: 1766 - DNA, 260 bp, Artificial Sequence
  Description of Artificial Sequence: Synthetic polynucleotide
tgaggctgcccgagcggtactgccgaacatgaccaactcaccgatggtcgtcaccggcaaccaccgggcgtggcgctacgtcatcaagcagcgctggcacaaggcagcggacgctgagatccgtgaactggcagggcttctgctgtcggagctgcgggagatcgctcccaacacctatcaggacatccccgaggagccgtatggctgatgtgcgggaggtagccgacctgttgaaccgtctgagcacgattgtgcgggaa

SEQ ID NO: 1767 - DNA, 260 bp, Artificial Sequence
  Description of Artificial Sequence: Synthetic polynucleotide
tgaagcggcacgagccgttctcccgaacatgaccaactctccgatggtcgtcactggcaaccaccgtgcatggcgcaacgtgatcaagcagcggtggcacacggcagcggacgccgagattcgggagctggcaggggagttgctgaagcagctacggcaggtcgctcccaacacctaccaggacatccccgaggagccgtatggctgacgtgcgggaggtagctgacctgctcaaccggctcaacggcattgtgcgggag

SEQ ID NO: 1768 - DNA, 260 bp, Artificial Sequence
  Description of Artificial Sequence: Synthetic polynucleotide
tgaagcggcacgagccgttctcccgaacatgacggactcaccgatggtcgtcactggcaaccaccgggcgtggaggaacgtcatcaagcagcgctggcacatggcagcggacgccgagatccgtgaactggcagggcttctgctgtcggagctgcgggagatcgctcccaacacctatcaggacatccccgaggagccgtatggctgatgtgcgggaggtagccgacctgttgaaccgtctgagcacgattgtgcgggaa

SEQ ID NO: 1769 - DNA, 260 bp, Artificial Sequence
  Description of Artificial Sequence: Synthetic polynucleotide
tgaggctgcccgagcggtactgccgaacatgaccaactcaccgatggtcgtcaccggcaaccatcgagcgtggcgctacgtcatcaagcagcgctggcacaaggcagcggacgccgaaatccgggaactggcagggcttctgctgtcggagctgcgggagatcgctcccaacacctatcaggacatccccgaggagccgtatggctgatgtgcgggaggtagccgacctgttgaaccgtctgagcacgattgtgcgggaa

SEQ ID NO: 1770 - DNA, 260 bp, Artificial Sequence
  Description of Artificial Sequence: Synthetic polynucleotide
tgaagcggcacgagctgtgctgccgaacatgaccaactcaccgatggtcgtcaccggcaatcaccgtgcatggcgagacgtgttgaagaagcggtggcacacggcagcggacgccgagattcgggagctggcgggagagttgctgaagcagctacggcgggtcgctcccaacacctaccaggacatccccgaggagccgtatggctgaagtgcgggaggtagctgacctgctcaaccggctcaacgtcattgtgcgggag

SEQ ID NO: 1771 - DNA, 260 bp, Artificial Sequence
  Description of Artificial Sequence: Synthetic polynucleotide
cgagttagctccaaaaaacaaagcgaacatttcgaacatcagatcgaattctgcaaataatactatccagattacacagttattacagatattttttcgggaattaattttaacagaaaaggtatacagatcgttttggaatcggcgatgcgcggagatctcgaagaacttgtggttgcctacaaagatagactgtgtagattcggttacgaacttatcgaattgatcgttggaagatacggtggacgaatcgtcgtttt

SEQ ID NO: 1772 - DNA, 260 bp, Artificial Sequence
  Description of Artificial Sequence: Synthetic polynucleotide
acgagccgttctcccgaacatgaccaactctccgatggtcgtcactggcaaccaccgtgcatggcgcaacgtgatcaagcagcgctggcacaaggcagcggacgccgagattcgggaactggccgggatgctcctccaggagctccggaagatcgcaccgaacacctaccaggacatccccgaggagccgtatggctgacgtgcgggaggtggcagatctgcttaataggttgaacaccattgtgcgggaactggtttca

SEQ ID NO: 1773 - DNA, 260 bp, Artificial Sequence
  Description of Artificial Sequence: Synthetic polynucleotide
acttttgactaaaaaaagtgagatgtgaatcacggacataaaaccataattttcgatgtcatggttccaattaaatttgattgttatcgtatggaagcttggggcggagtaggcgtcatctggtcgttctggtagaagaattgcgcgaacgcagcgttaatttccgcagcctgacagattccatcgataccagtacaccaatgggacgtttctttttccatatcatgggcgcactcgctgaaatggaacgtgaattaatt

SEQ ID NO: 1774 - DNA, 260 bp, Artificial Sequence
  Description of Artificial Sequence: Synthetic polynucleotide
ccaaacgttattcttatcgaaaatgtcggtgatgaatatttttataaattgatgaagtaggaaagaaatgaagaatattaattttagagcgtggaacaatgagctaaagcgttacttctatatgaaagacgaaaacagcttaatgatcgcagaaacaaactgcacagttgcaatgtggtgtagcgatggaatatttgatgaatgtgatgccgatgaagttgaattagcaatagggatgaaagactttgacggtaaagaca

SEQ ID NO: 1775 - DNA, 260 bp, Artificial Sequence
  Description of Artificial Sequence: Synthetic polynucleotide
gaagaggagaaccttatcttaaaaaaagcaagtgccatattcatgcaaaacttaaagtaagactcctcgctgtctatcggttacgctttgaacacgccacaacaatcttgtgtcgtgttttacgtgtcaatcgctccacttactataaatttctaaaacataagccctcaaaaagagatttggataatcaaatttatagaaaacaaatacttgagatttataccaaagcaaacaaaagacttggtgcgaagtctatcaag

SEQ ID NO: 1776 - DNA, 260 bp, Artificial Sequence
  Description of Artificial Sequence: Synthetic polynucleotide
tcgctgtctgaggagaacgaaatcctaaaaaaagccctaggctttcttgcgcagaagtaaccaatatctttgattacattcaccaagaaagccatcaccaccaggtaaccaagatgtgccgaatcctcggtgtttccagagctcagtattatcgttatcgatcccccaaaccttcaaaacgccgggccgaagatgcggacttgaaacaacggattctgcggatctttgcggaatttaagcagcgatacggtgttatgaag

SEQ ID NO: 1777 - DNA, 260 bp, Artificial Sequence
  Description of Artificial Sequence: Synthetic polynucleotide
cgaagcggcgcgagccgtcctgccgaacatgaccaactccccgatggtcgtcaccggcaaccaccgagcgtggcggtacgtcatcaagaaccgctggcacgaggccgcggatgccgaaatccgtgaactggcaggggaattgcttcggcagctccgggagatcgctcccaacacctaccaggacatccccgaggagccgtatggctgacgtgcgggaggtagccgacctgctcaaccggctcaacgtcattgtgcgggag

SEQ ID NO: 1778 - DNA, 260 bp, Artificial Sequence
  Description of Artificial Sequence: Synthetic polynucleotide
tgaggctgccaggtcagtcctgccgaacatgaccaactcaccgatggtcgtcactggcaaccaccgtgcatggcgcaacgtgatcaagcagcggtggcacacggcagcggacgccgagattcgggagctggcaggggagttgctgaagcagctacggcaggtcgctcccaacacctaccaggacatccccgaggagccgtatggctgacgtgcgggaggtagctgacctgctcaatcggctgaacacgattgtgcgggag

SEQ ID NO: 1779 - DNA, 260 bp, Artificial Sequence
  Description of Artificial Sequence: Synthetic polynucleotide
tgaagcggcacgagctgtcctgccgaacatgaccaactcaccgatggtcgtcaccgggaatcaccgggcatggcgcaacgtgatcaagcagcggtggcacacggcagcggacgctgagatccgtgaactggcagggaaattgctgcggcagctacggcaggtcgctcccaacacctaccaggacatccccgaggagccgtatggctgatgtgcgggaggtgtccgatctgctcaaccggctcaacgtcattgtgcgggag

SEQ ID NO: 1780 - DNA, 260 bp, Artificial Sequence
  Description of Artificial Sequence: Synthetic polynucleotide
tggattcccaacaagatacccttgtttaaatgttgatatatactttccgtaattatgtattgcacgaacatcagccatatccttatcttgtctacgctctgtcaaagacacttcgtggttgtggatgtatactataaaagtagacaaaactttgtgtgttataatctgttttaaaagacacaaaaacgaaaggacaacctatgtcaacatttaaacgctacgatgaagaatttaaacaatcccttgtcaacctttatcaa

SEQ ID NO: 1781 - DNA, 260 bp, Artificial Sequence
  Description of Artificial Sequence: Synthetic polynucleotide
aggttacgttgatattgatcctattttatctactattagtgaatctatcaaaaaacaatatacaaatctccaaataccaatgaattaatttcatcaaataaaattgattttaaaatgtattagtagatcttaatatcattaataatgatactaagataattacttcaaagtaaaaaatcttattagatagaaaaattagtatgagatctttatattccacttgtgatgtaaaaatacctattcaaaaatggtataatatc

SEQ ID NO: 1782 - DNA, 260 bp, Artificial Sequence
  Description of Artificial Sequence: Synthetic polynucleotide
ggaggtggattgtgagtgaattaattaaggttttggatggtggtgatttccgtgatcgttggaatgagctttgtatcaagctagaagattatgaaaacatcaattgtgataattacgaacaagagctccatgatttatttgaataccacagctttaaatttgatgaatcaaagcacgaatattgggaaatcgaataatgagtgaagttaaagcggaaagtaaggaggggtgaaatgacaaaaacatccatagatcaagaa

SEQ ID NO: 1783 - DNA, 260 bp, Artificial Sequence
  Description of Artificial Sequence: Synthetic polynucleotide
atcgctgaacagatgggcgtgagccgtgcaaccctttaccgcaatttggagaccgcataatgagcgccaagccgctaaccgccgccgaggctaaatgggtgaaggacttgcagacccttctgaacaagtgcccatccaagcgaatggtcgccttcacgattggcgatcccatggtggttatctatgactcctcattttctggcgagatagatgacatcatgaaccgctcaaacaaggatgtgtgccaagtcgtgacagcc

SEQ ID NO: 1784 - DNA, 260 bp, Artificial Sequence
  Description of Artificial Sequence: Synthetic polynucleotide
ctttttgatgttagcatttccactctttacaagaaattccctgtaaatcagtcgcgttgaaagtggcgatattgtaccagcactgacacatcgtgaaatgcgtgcgccgcacgcctggcaaccagaacataaggtatccctgtcaaccggagagactgccttatggctcaggattaccaccacggggtgcgcgttgttgaaatcaacgagggcacccgacctattaccacggtgagcactgccatcgtgggcatggtctg

SEQ ID NO: 1785 - DNA, 260 bp, Artificial Sequence
  Description of Artificial Sequence: Synthetic polynucleotide
tttcacgaaccccattcagaaacgaatgcactccgccaaagatagataaaaataaaattgttaagtcagacataaaaaccttgccaattttgagttgttcgtcattggggaacggtatgtactttgtgatttccatacatactggtttttgttaattaaaatccgcagcttgctataaataacgatagtgagcagaaaatatgctaataggctatgtacgcgtatcaacaaatgaacaaaacactgctttgcaacgaaat

SEQ ID NO: 1786 - DNA, 260 bp, Artificial Sequence
  Description of Artificial Sequence: Synthetic polynucleotide
cctctgcggcctcttgtgggatagagatttttttagtcatgggaatcagtcctgttaaggctccccaccacaatggctaaaggtacaggacagaccggggagcaagttaagtataaccacttcaaaataattaaacaaatgacttgattttacccgatctagtgactaagattaattcaacttaaacaggaaggataattatgaaattcaccgacacaccaacaaccacgcttgatgaggtacttatctcaacgcgtggc

SEQ ID NO: 1787 - DNA, 260 bp, Artificial Sequence
  Description of Artificial Sequence: Synthetic polynucleotide
cattggcgaaactgcaaattattttggcggtttgggtggaagcaatccccatcaaagctacacgctaacgttcagttttttatctttggattcacaaagtgtaacggtcgatacagccttaggttgttcaatcaagagcttagtttttactactagaagacggcaacctcttaaattcaacttaaacaggaagactaatcatgaaattcacagacacaccaaccactacgcttgatgaactgctcatctcaacgcgtggc

SEQ ID NO: 1788 - DNA, 260 bp, Artificial Sequence
  Description of Artificial Sequence: Synthetic polynucleotide
ggtgtggcacgttttgttttttacattctttattgcacataatattcagtcctgttaaggctccccaccacaatggctaaaggtacaggacagaccggggagcaagttaagtataaccacttcaaaataattaaacaaatgacttgattttacccgattcagtgactaagattaattcaacttaaacaggaaggataattatgaaattcacagacacaccaaccaccacgcttgatgagttgctaatcaaacatcgaggc

SEQ ID NO: 1789 - DNA, 260 bp, Artificial Sequence
  Description of Artificial Sequence: Synthetic polynucleotide
attaacaaaatggtttctgactcaggccaatcaagcatcggaatggccattgcgatgaattcaattccagacctaactctcgctctattcaattttcaagaagctgtaaatccagcgatggagtcacaaggtgtgaaaatcctcaccctttctgagttgttcggtcaagaaattacactgacagttaagtaaggaatattatgaaattcaccgacacaccaacaaccacgcttgatgaggtacttatctcaaagcgtggc

SEQ ID NO: 1790 - DNA, 260 bp, Artificial Sequence
  Description of Artificial Sequence: Synthetic polynucleotide
attaacaaaatggtttctgactcaggccaatcaagcatcggaatggccattgcgatgaattcaattccagacctaactctcgctctatttaattttcaagaagctgtaaatccagcgatggagtcccaaggagtgaaaatcctcaccctttctgagttgttcggtcaagaaattacactgacagttaagtaaggataattatgaaattcacagacacgccaaccacaacgcttgatgaactgcttgagtttacgcacggc

SEQ ID NO: 1791 - DNA, 260 bp, Artificial Sequence
  Description of Artificial Sequence: Synthetic polynucleotide
attaacaaaatggtttctgacgcaggtcaatcaagcataggaatggctattgcaatgaatgcaattccagacttaactcacgctctattccattttcaagaagctgtaaatccagcgatggagtcccaaggagtgaaaactctcaccctttctgagttgttcggtcaagaaatcacactgacagttaagtaaggaatattatgaaattcacagacacaccaacaaccacgcttgatgaggtacttatctcaacgcgtggc

SEQ ID NO: 1792 - DNA, 260 bp, Artificial Sequence
  Description of Artificial Sequence: Synthetic polynucleotide
tggattctgttatcggctaaccggaagggagttaaaaaacgggattaccgcgctaactagaagcatgagggaaggttgtggcatccggtgaacctgtaggaatcccataactgattaaggacggaaaccaccagatgccacgaagatgttatggcgcatgttgttgtgggaagtcaataaaggagatggttttgtttaaaaaatagtctatcatggtgagaaaatgattttgataagtaggctaactttctgaaaatact

SEQ ID NO: 1793 - DNA, 260 bp, Artificial Sequence
  Description of Artificial Sequence: Synthetic polynucleotide
gtgcgagtgcatcgcgatggctggaataatatcacgcacttggagtggttaaacaaatgagaaagaacggtaacagcaagcatgtgctgcgcgtcattaccgatcaccagccagtgactaccaagaagattgctttcttgctcgggctgacaagtaagcaggttagtgacgcaactcaatacctgcgtgataagtcattggtaaagcttgtgcgtaacggctatgtggtcataggcggcgagtttgacaatgtaccggcc

SEQ ID NO: 1794 - DNA, 260 bp, Artificial Sequence
  Description of Artificial Sequence: Synthetic polynucleotide
agcctctgcggcttctagtgggatttgcactgtcataaatatagtcctgaatttaatgctccccaccacaacggctaaaggcacaggacagagccgaggagcaagttaagtataaccacttcaaaataattaaacaaatgacttgattttgttcaatatgctgattaagattaattcaacttaacaaacaggatgattaaatgaaattcacagacacaccaaccaccaccattgatgaagtgttaattagcactcgtggc

SEQ ID NO: 1795 - DNA, 260 bp, Artificial Sequence
  Description of Artificial Sequence: Synthetic polynucleotide
gggaagctagtggttttcgttgctgaccgtagacaggggcatcataagaaggctaactaacaatgcaaacaccaaactacgcacgtaacgcacacaaggctgcacaagccgaaagagacaaagactatccaatggcagcggtgtattggaataaagccgctaaaagcgagtgtagcgacaaacagcgccattgggctgagtgtcgctgtcataactgcaaaagatttgtggaggaatgggatgtttagattaatatgcgc

SEQ ID NO: 1796 - DNA, 260 bp, Artificial Sequence
  Description of Artificial Sequence: Synthetic polynucleotide
cctctgcggcctcttgtgggatagagatttttttagtcatgggaatcagtcctgttaaggctccccaccacaatggctaaaggtacaggacagaccggggagcacgttaagtataaccacttcaaaataattaaacaaatgacttgattttacccgactcagtgactaagattaattcaacttaaacaggaaggaatattatgaaattcacagacacacccaccaccacgcttgatgagttgctaatcaaacatcgtggc

SEQ ID NO: 1797 - DNA, 260 bp, Artificial Sequence
  Description of Artificial Sequence: Synthetic polynucleotide
cctctgcggcatcttgcgggatagagatttttttagtcatgggagttagtcctgttaaggctccccaccacaatggctaaaggtacaggacagaccggggagcaagttaagtataaccacttcaaaataattaaacaaatgacttgattttacccgatccagtgactaagattaattcaacttaaacaggaaggataattatgaaattcacagatacaccaaccacgacacttgacgaagtacttatctcgactcgtggc

SEQ ID NO: 1798 - DNA, 260 bp, Artificial Sequence
  Description of Artificial Sequence: Synthetic polynucleotide
tctcttggtgcgtcatggcgtcgcattttttattacacataataatcagtcctgttaaggctccccaccacaatggctaaaggtacaggacagaccggggagcacgttaagtataaccacttcaaaataattaaacaaatgacttgattttatccgattcggtgactaagattaacttaacttaaacaggaaggaatattatgaaattcaccgacacaccaaccacgaccattgaagaattgctaatcaaacatcgtggc

SEQ ID NO: 1799 - DNA, 260 bp, Artificial Sequence
  Description of Artificial Sequence: Synthetic polynucleotide
gagcgtcagacgctgtttttccacattctttattacacataataatcagtcctgttaaggctccccaccacaatggctaaaggtacaggacagaccggggagcacgttaagtataaccacttcaaaaaaattaaacaaatgacttgattttacccgattcagtggctaagattaattcaacttaaacaggaaggaatattatgaaattcaccgacacgccaacaacgactattgatgaggtgcttatctcgactcgtggc

SEQ ID NO: 1800 - DNA, 260 bp, Artificial Sequence
  Description of Artificial Sequence: Synthetic polynucleotide
ctctgcggcctcttgtgggatagagatttttttagtcatgggagttagtcctgttaaggctccccaccacaatggctaaaaggtacaggacagaccggggagcacgttaagtataaccacttcaaaataattaaacaaatgacttgattttacccgattgagtggctaagattaattcaacttaaacaggaaggaatattatgaaattcaccgacacaccaaccacgaccattgatgaggtacttatctcgactcgtggc

SEQ ID NO: 1801 - DNA, 260 bp, Artificial Sequence
  Description of Artificial Sequence: Synthetic polynucleotide
tttcttggtgcgtcatggcaccgcattctttattacacataataatcagtcctgttaaggctccccaccacaatggctaaaggtacaggacagaccggggagcacgttaagtataaccacttcaaaataattaaacaaatgacttgattttacccgattcagtggctaagattaactcaacttaaacaggaaggaatattatgaaattcaccgacacacccaccactacgcttgatgagttgcttgagtttacgcgtggc

SEQ ID NO: 1802 - DNA, 260 bp, Artificial Sequence
  Description of Artificial Sequence: Synthetic polynucleotide
cactggcaaccaccgtgcatggcgcaacgtgatcaagcagcgctggcacaaggcagcggacgccgagattcgggaactggccgggatgctcctccaggagctccggaagatcgcaccgaacacctaccaggacatccccgaggagccgtatggctgacgtgcgggaggtggcagatctgcttaataggttgaacaccattgtgcgggaactggtttcagagaactctcagctgaaagcggaggctgagggcaaggctagt

SEQ ID NO: 1803 - DNA, 260 bp, Artificial Sequence
  Description of Artificial Sequence: Synthetic polynucleotide
ctgccatttctttggagatttttacttgtgatttagtcatgggaattagtcctgttaaggctccccaccacaatggttaaaggtacaggacagaccggggagcacgttaagtataaccacttcaaaataattaaacaaatggcttgattttaatcattactgtgattaagattaattcaacttaaacaggaaggaatattatgaaattcaccgacacaccaacaaccacgcttgatgagttacttaactcaacgcgtggc

SEQ ID NO: 1804 - DNA, 260 bp, Artificial Sequence
  Description of Artificial Sequence: Synthetic polynucleotide
ctgccatttttttggagatttttacttttgatttagtcatgggatttagtcctgttaaggctccccaccacaatggctaaaggtacaggacagaccggggagcacgttaagtataaccacttcaaaaaaattaaacaaatggcttgattttacccgatttggtggctaagattaattcaacttaaacatggaggataattatgaaattcaccgacacaccaaccacaacgcttgatgaggtacttatctcaacgcgtggc

SEQ ID NO: 1805 - DNA, 260 bp, Artificial Sequence
  Description of Artificial Sequence: Synthetic polynucleotide
ctagtgcgcgtcgagattcatggcgactttgaagaaaagttaactgtgattaatcattagtgtgaagttggtcacagcattaggcttgttttgtggttattatctaaacatcaaattaagagggcgtaacaatgggtttagtattaacaacgctaaccgaagcaaaagcgaacgggaatcttagagaagaatcattgcgcatggctggattgcttgggatggaattcaatcagtttattgaagaattagatatcggctgg

SEQ ID NO: 1806 - DNA, 260 bp, Artificial Sequence
  Description of Artificial Sequence: Synthetic polynucleotide
aaattttgcgttgataagtctctaacaattggcaaaacaaccattcaagtaaagagtactaagaagcttgataagggcgaaatgaccttttacatgaatcaaattcaccagtgggcggttaatgcaggatttaggctatcaatgccagaagattccgaatactaccaggcaatgcaacaacaaaaccaataggaaaaaccatgctaaaaacaaaaccaacccaagtgtgcactgtggccgatgttttagtgaagactcgc

SEQ ID NO: 1807 - DNA, 260 bp, Artificial Sequence
  Description of Artificial Sequence: Synthetic polynucleotide
tacgggtggacataccgagacgccggcacattcacggcgtcgatgcggtgggcccgatgaccaaccccgacaccaccaccaccgacccctacgacggcctcggatacgccgacgtcgccgacatctactacaccgccggctggcacggcgtcctcccactccgacccggcgtcaaagggccaccaccccaagggttcaccggcatcgacgcccccatgccctcataccccgacgtactcgaatggatcgaccgccacccc

SEQ ID NO: 1808 - DNA, 260 bp, Artificial Sequence
  Description of Artificial Sequence: Synthetic polynucleotide
aacggcgttttaatgattcatcagggcgggagaggtatctatgaccgtaaccagcattaaccaggcgaaacagcagtgtgaacgtgacgaagctgaattgcgcagcgtcagagagatgacggagcaacaccagaaggcgatggattatctgcatgagcgagagcgtgaactggtgaaccggcttggattgaacaagacatcgggaggcgatgctgcatgaatttggaaaacactgtgaaattccactctccgaagtctcc

SEQ ID NO: 1809 - DNA, 260 bp, Artificial Sequence
  Description of Artificial Sequence: Synthetic polynucleotide
aacggcgttttaatgattcatcagggcgggagaggtgtctatgaccgtaaccagcattaaccaggcgaaacagcagcgtgaacgtgacgaagctgaattgcgcagcgtcagagagatgacggagcaacaccagaaggcaatgaattatctgcatgatcgagagcgcgaactggtgaaccggcttggattgaacaagccagcgggaggcgatgctgcatgagtatacgagaattgaacctcactaaagagcagcatgactg

SEQ ID NO: 1810 - DNA, 260 bp, Artificial Sequence
  Description of Artificial Sequence: Synthetic polynucleotide
aacggcgttttaatgattcatcagggcgggagaggtatttatgaccgtaaccagcattaaccaggcaaaacatcagcgtgaacgtgacgaggctgaattacgcagcgtcagagagatgacggagcaacaccagaaggcgatggattatctgcatgagcgagagcgtgaactggtgaaccggattggattgaacaagccagcgggagacgatgctgcatgagactcgaaagcgtagctaaattccattcgccaaaaagccc

SEQ ID NO: 1811 - DNA, 260 bp, Artificial Sequence
  Description of Artificial Sequence: Synthetic polynucleotide
aacggcgttttaatgattcatcagggcgggagaggtatttatgaccgtaaccagcattaaccaggcgaaacagcagagtgaacgtgacgaggctgaattgcgcagcgtcagagagatgacggagcaacaccagaaggcgatggattatctgcatgagcgagagcgagaactggtgaaccggcttggattgaacaagccagcgggaggcgatgctgcatgagtatacgagaattgaacctcactaaagagcagcatgactg

SEQ ID NO: 1812 - DNA, 260 bp, Artificial Sequence
  Description of Artificial Sequence: Synthetic polynucleotide
aatggtaaattattcgttaaaccaggattaaaaggacgacatacccgtgacaaaagataaacagttattacgcgacctggaagaaaattatgaacgtgcgctggctgctgtagcatatctggaagaacagatccgcgaagttaaaaaccgtttacagggtaacgagaaacgtaatctaccccattgttaaacctgtgatataatcagccttagtaactctactgaggcttttttatggctgttaaagacccatatccgga

SEQ ID NO: 1813 - DNA, 260 bp, Artificial Sequence
  Description of Artificial Sequence: Synthetic polynucleotide
gaggggattgcgttggcgaaggcgcgtggtgtgtgtactgacctgatctgtcccgtttgacccacgaacatcgtgaacgcgggcagaattgcactctgtgacagagccgaaaacgattcgtcggtatacgactcgtgcattgcttgacgtcggacctcaaccaggaatggtcatccgcgcctccgacgacgatgctgctccgtggaagctagtcgacactctccacgacgaatggttttgggacacaactcccggccagg

SEQ ID NO: 1814 - DNA, 260 bp, Artificial Sequence
  Description of Artificial Sequence: Synthetic polynucleotide
aacggcgttttaatgattcatcagggcgggagaggtgtctatgaccgtaaccagcattaaccaggcgaaacagcagcgtgaacgtgacgaggctgaattacgcagcgtcagagagatgacggagaaacaccagaaggcgatggattatctgcatgagcgagagcgtgaactggtgaaccggcttggattgaacaagacatcgggaggcgatgctgcatgaatctggaaaatgtagtgaagtttcacttcgcaaaatctac

SEQ ID NO: 1815 - DNA, 260 bp, Artificial Sequence
  Description of Artificial Sequence: Synthetic polynucleotide
aacggcgttttaatgattcatcagggcgggagaggtatctatgaccgtaaccagcattaaccaggcgaaacagcagcgtgaacgtgacgaagctgaattgcgcagcgtcagagagatgacggagcaacaccagaaggcgatggattatctgcatgagcgagagcgtgaactggtgaaccggcttggattgaacaagccgtcgggaggcaatgctgcatgagtatacgagaattgaacctcactaaagagcagcatgactg

SEQ ID NO: 1816 - DNA, 260 bp, Artificial Sequence
  Description of Artificial Sequence: Synthetic polynucleotide
aagatgcttgggattagtcgctcggggttgggtggtatcttgaagagggtgagtagatgattgtctttttatgcgtcttgctatttgctgttatagcagggtggaagtcggatagttggcatggctcactattgatggggtttataattttagctttgttgttgtcgatattaagagttggaggttgggtgtgaaaattgatggtaaatacgattcttatattgtttatagtgagaaggggtataaaaatagaatccgat

SEQ ID NO: 1817 - DNA, 260 bp, Artificial Sequence
  Description of Artificial Sequence: Synthetic polynucleotide
caatattgtgaccactagactttatttagaaggaagtgtttcagaagatctatttgaagaaattatggattctgccgatttgtctaagtgggatccgattgcaccacatggttttttcttaatagatattggctttactgaagatggtgctgaagctttgtttgcaaaagaagttaaagcggaaagtaaggaggggtgaaatgacaaaaacaccaatagatcaagaaattgacgaggccatagctaatggtgaaagcttt

SEQ ID NO: 1818 - DNA, 260 bp, Artificial Sequence
  Description of Artificial Sequence: Synthetic polynucleotide
gggtggcaagaaaaagccaaagctcaggcggtgccagagggttatgttgtagtgccgaaagatgttgcagaacgaacaattggtcatattggcatagcaatctatcatccaaacaatactcgtgatgaagaaaatattatgagtgaagaccaagtggttattgagcgcgctattgaagcaagcgaatcgggagctgagggatgaatagatcaatagagcaagaaattgacgaagctatagctaacggtgaaagcttttat

SEQ ID NO: 1819 - DNA, 260 bp, Artificial Sequence
  Description of Artificial Sequence: Synthetic polynucleotide
aaagaagtggttgaggagatgcggggtgtagacaatatgctggctagtttaatggatgccaatgttgattgggcttactcattccctgtttacaaaggtgaggataaagcggttattgcatcaaactttgctaatgagtcataccagatttgtaaggatgaagaaaatcgtgcggctaatgttaaggagttttactagcaatgaaaacaaccgtagatcaagaaattgacgaagccatagctaatggtgaaagcttttat

SEQ ID NO: 1820 - DNA, 260 bp, Artificial Sequence
  Description of Artificial Sequence: Synthetic polynucleotide
attgtaaatggtaagttatttgttaaacctggctttaaaggacgcattaagcatgactaaagacgaacagttattacgtgatttagaacaggattatgaacgtgcacagactgctatagcttatctggaagaacagatccgtgaagttaaaaaccgtttacagggtactgaaaaacgtgtcgtacagcgataacttaaacctgtgatataatctgcctcagttaccacgactgaggcttttctatggcagttcgcgaccc

SEQ ID NO: 1821 - DNA, 260 bp, Artificial Sequence
  Description of Artificial Sequence: Synthetic polynucleotide
aataacccaagcgatgcatggccgattattgttgagagcaagatttcattaattgaagagggtgacgagtgggcggcttactttgtttttgagttacctgaaaacatggagggcggtgggtgtgattttattcatggatggactgataaaaacccactacgcgccgcaatgattgtttatcttatgatgcaggaggcgaaatgctaacaatctcagaccttttagtcatgacgcgcggcaaccaatcagaagtcgcacgt

SEQ ID NO: 1822 - DNA, 260 bp, Artificial Sequence
  Description of Artificial Sequence: Synthetic polynucleotide
agcctttaccgcaaaatgaaagaattgaaagtttttactgaagagaaggaaaacaactaatgcgcgatttccgtaaagctttaaacaacaatgttatgatgaagtatgaatctttctttggtcatggagatatcaaaacgttttggattgaacttaaatcgggtttgacactttcaattcaagctggggaaggtaattatagttctccacgcacaaactttaaacatcctcagtttcagcgttataaagaatttgagatt

SEQ ID NO: 1823 - DNA, 260 bp, Artificial Sequence
  Description of Artificial Sequence: Synthetic polynucleotide
accaaaactttataaaaatgaaggaaaaaataatacgaattttagaaaatagagcaacaaagtttgaatctataaaccactcttatgaagcacgggaagtaaaaagcgcaatagacacaattaaaaggctcgtacctcctgaattatttgatatacacattgttacctgacgaagtgaacagtttaaaatactatttattatgaaaaaatggactaaagaagaagaacaagaattagtgaggcttactgaaaatgcgtgg

SEQ ID NO: 1824 - DNA, 260 bp, Artificial Sequence
  Description of Artificial Sequence: Synthetic polynucleotide
acgacggtgctcacaccgtcttcaacttcgaccacatcacccactacgtcgtggttccgatcgatgacgagaaggaagaggagggattccgaattggctgagactcgccaacgcttctgagggttctcgatgagatcgaggacatcctcgcggagaacgaagacctgcggcatgaggtcgagaagctgagggcagagtcgttgcacgccaagggcgctggccgaccgaaccgcaagaagctctctgccgaagaggccaag

SEQ ID NO: 1825 - DNA, 260 bp, Artificial Sequence
  Description of Artificial Sequence: Synthetic polynucleotide
atagatcgcgatacggtcaagcgatgggtggcagagcataaaaactcaaaaggttcgtagcgttacaaacagcaataaggcttcgaagccagggagcaaaacacagccaccctatatttgaggtgtcaacctgtaagacatcccatggcaatcacccgcgtaactcgcgacgtcacgatctcgtttcgagtcagtgagaaggaagccgagctcctgaacagagccgctgacagtcgctctctgaataccagcgcctggat

SEQ ID NO: 1826 - DNA, 260 bp, Artificial Sequence
  Description of Artificial Sequence: Synthetic polynucleotide
gtagccgatgtgacaggcgtggacgtgaaaacaatctacaagtacctcccggcgacttgaagacaaagatttcactacttttcctgatatgttacgtttggcttaatcaattcattcagctttgaaaacagtttgggttgttcgtgaacggtaagaaaacaataagttttgagcaatttttaactattaacagcaatcttgtttccatctcagatacatgggctgacttgtgggcgttaatttttcacacgggtttaagc

SEQ ID NO: 1827 - DNA, 260 bp, Artificial Sequence
  Description of Artificial Sequence: Synthetic polynucleotide
gcacagagcttaaatgtaagtgtggctaccgtgtttaaacattgtaaggcaggtgattgatggctaaggcaagagaatcacaagcagaggctcttgccagatgggagatgctacaggaattacagcagacctttccttacacagcggaaggtttgcttctctttgcagatacagttattcataacttgattgcaggcaaacctcatctgattcgtatgcaggccgatattttaaagtttctattctatggacataaatat

SEQ ID NO: 1828 - DNA, 260 bp, Artificial Sequence
  Description of Artificial Sequence: Synthetic polynucleotide
ctgtgctgcgcgggagttggcggatgcgctcgtccgccggggtgaacgagcggtgggcggggcatcgtgaaggcggcggggatgagccggacgcggtccttgatggggccgggggtgcgggctgatgccgcaggtgggtgcgttgtgcgagcaggtgacggtgctggccaacatggtcgagtcggcgctgggcggcggtcatgaacgggctgtcgaagatcacggcgtcgcaccgctccaggacggcggcgatctatctg

SEQ ID NO: 1829 - DNA, 260 bp, Artificial Sequence
  Description of Artificial Sequence: Synthetic polynucleotide
cggtcgctcgggatgaaggagagccaggtcgggaaggtgcgcaagacgatctccgccctgcgcaaggggagggaccccgcctcgatcgccgccctccgcacccgctcctgacgacgtcccgcggcgccgggcgtcgtccgtcccccgcagggtcccgaaattccggtttcgggacccccggccgtccacgggcccgtcgtatggacccgcgccgtccgcgatcccctcgaggggccgcgcgaccgagtccgcgcccgatc

SEQ ID NO: 1830 - DNA, 260 bp, Artificial Sequence
  Description of Artificial Sequence: Synthetic polynucleotide
atcccaggttcccggcgaggtcaccggccggggggaggagagcatgtcgcgcgagcgcccgtggcacgtccagcgcagcggcgtgccaaccgcgaccggccagcagcactgggaccgggcctatcagctcctcctgcagtgggcgacgaccccgtccgtctcggccgagacgctgaggccgaacctgccggaggcatcccatgcgtgtagccctgtacgctcgcgtctcgaccagccatcaagtcgagcaccaaaccatt

SEQ ID NO: 1831 - DNA, 260 bp, Artificial Sequence
  Description of Artificial Sequence: Synthetic polynucleotide
cccagcagtttgcgagctttggtccggatggtccgtgagcacggcagagcgccgtcaacggagaccagtgatgccatgtcccaccaccaggatttggacgcgcctgccgctcgatgcgaaggcagcgacgacgcagctctgggccgagctgatgctccggcgcgcagcacgcgagcgcgcacgcaacggggtgcccggccatgaccgcgcattccaaggtggagggacggcacctgcggctgctcgcccttgtctacatc

SEQ ID NO: 1832 - DNA, 260 bp, Artificial Sequence
  Description of Artificial Sequence: Synthetic polynucleotide
ctcttcttcagcggcgtgatgagtcgccgcccgctcaaggagaaggcatatgcaactgaagctgacatttgccgaggaagacagcaaccggcattccgaaccgcctgcctgtgagaagctggacgccgaggcgcgggcaaaggcgttgcgccgacttgccctgatgatcgcacgcatgctgacagccagggaggcctgcgatgattgaacacagcaagattgccactggccatctggcacggcaggctgtcgtctccctg

SEQ ID NO: 1833 - DNA, 260 bp, Artificial Sequence
  Description of Artificial Sequence: Synthetic polynucleotide
atcacgccggggccggcgaggtgtcctgtgcaccttgtccggccagcggtccgaagatcccggctcggctggtcccacgctccaatgggcggatcttccgccctcgccgccggtgccatgagggatgtggcttctcatgttgcccggaggacgaccgccggccggaaggcggggacggcccgaccggaaggggattctgcatgaagcggttgaatggcctgttcgatgaggctgcccgggatcggcgcgccctggccgcg

SEQ ID NO: 1834 - DNA, 260 bp, Artificial Sequence
  Description of Artificial Sequence: Synthetic polynucleotide
atcattgatgctttgctgcgccagacggaacaggagagcaacgatgcaactgaacctaaccttcgcagacctgccgccggacgacgacagtctgtgggaacaactcgaccaaacaacacgccaagcggtgatcgacagtctggctcaagcgatcgcgaaggtcgtgacgggcaacgatccgatccacagggagaacgctgatgagtgacactgccaacaagatcggtaccagccatttgcagcgtgcggcgttcgtctac

SEQ ID NO: 1835 - DNA, 260 bp, Artificial Sequence
  Description of Artificial Sequence: Synthetic polynucleotide
gagaagcgcaatgggcaagctgccaaacgtcgttccagcaagtctgcagtcgttgcaatcgataccgcgccagatgaacatgacgttcgacgccgtcgagcttcaggggatgagcgcggtacaacgcgcaagggcaatcacccatctggcgagcctgctgatgcaggccgccggcgtcgccacgccaaaggagcataacgatgacgaacgttgatcgtttgcctgagctccttcttaaacgcaaagcggtgatctacgtc

SEQ ID NO: 1836 - DNA, 260 bp, Artificial Sequence
  Description of Artificial Sequence: Synthetic polynucleotide
gtggcacagcaccgggcaactcaggacttagacgcacaagcaggtgtcgtatgccaggacagcccattcccccccgtctcaaccgccagcagtccatcaactgtggtttcagttatcccttgcccaacgccaacgattagtagccgttctcaccgagatgatgagcgctcagatcactgctctggagcaggaggaacatcatgaatcctaaacgtgaagctcacaaccgccgctctgagaagattgacgatctgcatctc

SEQ ID NO: 1837 - DNA, 260 bp, Artificial Sequence
  Description of Artificial Sequence: Synthetic polynucleotide
ggctggcggtccgtgaggggagcgaaccgtcatgtgcggcggaagcgacgtcggccccagaagccggtccgagctcatctgagcgaacgtgtgtgggacaggttgccggaagtgaaccggcaagtggtcgttcagcagttggtgaggctggtcggccgtgtgatagcgccggatgagcggggtcggccgtgacggcggtgatgccctgggagagggctaacagcaaggtatgtgaccgtcacctgcagcggttggcggtg

SEQ ID NO: 1838 - DNA, 260 bp, Artificial Sequence
  Description of Artificial Sequence: Synthetic polynucleotide
ccgcttatggcccgtagcggcctgatgctctttctgcgccggggcatgtggggatgggttcaggcgctgacagcaacagcaagcaccccgcgagagcagatttacccatcgtcaattgcttggccgctgcacggcgggcacagcgccgttgttcacgtccttgcgacaatcgccatgagcatcaacgatcggagatcaccatgaatgtacatctcaaagtccagcctcatcacctcgaacgcggcgcctacctgtacatc

SEQ ID NO: 1839 - DNA, 260 bp, Artificial Sequence
  Description of Artificial Sequence: Synthetic polynucleotide
gcatcgggagacatcgcatgtccgtcgccccccgtcacaacgctcccccccgcgcctgacgacggcgccctgcccaccgccgacggtcgcaccgacgatctgggcccgcctgccggccgaccggcagcgacagctccgcgacctgctcggccaactcctcgccaggctcctggcggccacccgaagcgaggaggccggccatgagtgacgcaacccgctcgcccaagctccggccctggcatctcgaccgggcggccttc

SEQ ID NO: 1840 - DNA, 260 bp, Artificial Sequence
  Description of Artificial Sequence: Synthetic polynucleotide
ccgctcatggcccgtagcggcctgctgctctttttgcgccggggcatgtggggatgggctcaggcgttagcctcaacagcaatcaccccgcgagagcagaattacccgtcgtcaattgcttggccgctgcaccgcggacacagcaccgtcgttcacgtccttgcgacaatcgccatgagcatcaacgatcggagatcacgatgaatgtacatctcaaagtccagcctcatcacctcgaacgcggcgcctatctgtacatc

SEQ ID NO: 1841 - DNA, 260 bp, Artificial Sequence
  Description of Artificial Sequence: Synthetic polynucleotide
ccgcttatggcccgtagcggcctgatgctctttctgcgccggggcatgtggggatgggctcaggcgctgacagcaacagcaagcaccccgcgagagcagatttaccaatcgtcaattgcttggccgctgcacggcgggcacagcgccgttgttcacgtccttgcgacaatcgccatgagcatcaacgatcggagatcaccatgaatgtacatctcaaagtccagcctcatcacctcgaacgcggcgcctacctgtacatc

SEQ ID NO: 1842 - DNA, 260 bp, Artificial Sequence
  Description of Artificial Sequence: Synthetic polynucleotide
ccgctcatggctcgtagcggcctgatgctctttctgcgccggggcatgtggggatgggttcaggcgctgaccgcaacagcaaccaccccgcgagagcagagttacccatcgtcaattgcttgtccgctgcatgtcggacacagcgccgtcgttcacgtccttgcgacaatcgccatgagcaccaacgatcggaggtcaccatgaatgtacatctcaaagtccagcctcatcacctcgaacgcggcgcctacctctacatc

SEQ ID NO: 1843 - DNA, 260 bp, Artificial Sequence
  Description of Artificial Sequence: Synthetic polynucleotide
gaggtgattcgcgatgaacgtgcaatcaaaaccgtaccgcgtagcgtctcagtccctcgtaaagcttctgaccccgagcacgacagtcccgcgtccgtggctcgatctgccaccggagacgcggaaacaagtcgctcaaaagcttgcccgcctgttgatgcggatgcggtcaatacgcgcgccgacaaaggtagaccggcatgctgagagcgacgaatagcccagacgagcgcgtcacggccgagcatcgcggcaagctc

SEQ ID NO: 1844 - DNA, 260 bp, Artificial Sequence
  Description of Artificial Sequence: Synthetic polynucleotide
aaggtgatccacgatggcccaacgctgtcccttgaaccgggagcccgcttctccgaccaggctgcacctgcaccgctctcggcaccaaccgatccggccgtggccgaacctcccggccgagacgcaaacgcagatggctcagcttctggccgagcttgtgcgacggatgcacccgatgccgccgatcagggagaagaccgatgctgagcgtcacgaacccttctgacgagcggctgacctcggcccgccgcgccaagctg

SEQ ID NO: 1845 - DNA, 260 bp, Artificial Sequence
  Description of Artificial Sequence: Synthetic polynucleotide
gacccaccgaccgcttccaggtcgcgttgcgtatcgacccctgccgaccttggcagatccacccggccgtccgacggccgacgttccgcgcctgtggcccaatctgtcgaccgcgacgcaaacccagattgctcaaacaatcgccgcgctgatgcggcgaatgcaagcgatccccggcacgcccggaaggggactgggtcgtgctgatcagctcgaacatcgctgacgagcggctcacgaccgcacaccgagccaagttg

SEQ ID NO: 1846 - DNA, 260 bp, Artificial Sequence
  Description of Artificial Sequence: Synthetic polynucleotide
aaggcccgtagcggcctcatgctttttctgcgccgcggcatgtggggatgggcccgtgcactgcctgcggcggcaagccctgatcaagacccgttttacctgtcattggccacccgaccggcgcgcgacgacctcagcgccgtcgttcatgtcctggcgaccatcgccatgagcatccaccaacggagagcaccatgaacatgaatgtacacctcaaagtccagtcccatcaccgtgaacgcagcgcctacctctacatc

SEQ ID NO: 1847 - DNA, 260 bp, Artificial Sequence
  Description of Artificial Sequence: Synthetic polynucleotide
ctgccgctcaaggcccgtagcggcctcatgctttttctgcgccgcggcatgtggggatgggcccgtgcactgcgtgcggcggcaagccctgatcaagacccgttttacctgtcattggccacccgaccggcgcacagcgccgtcgttcatgtcctggcgaccatcgccatgagcatccaccaacggagagcaccatgaacatgaatgtacacctcaaagtccagtcccatcaccgtgaacgcagcgcctacctctacatc

SEQ ID NO: 1848 - DNA, 260 bp, Artificial Sequence
  Description of Artificial Sequence: Synthetic polynucleotide
atgcgagtcgttgcgctggcagaggcgttgcgccgttcatcacaggacgaggaatgccagagtgaacatcagctctccccggagacggccaaagatccagatatggtcgagcctgccgccagcaatccagcgtcagctggcggcgacgatagcgcaggctttgtgctcgcgcccaactgcccgctacgccggtgacaccgatgttgagagattatgccgtagatgaacggataagcaccacgcagcaggccaagctggcc

SEQ ID NO: 1849 - DNA, 260 bp, Artificial Sequence
  Description of Artificial Sequence: Synthetic polynucleotide
ccggtcgcggcgaccgaaccacggatgtcgatggagaatcgaacgaagctgagcgtcgaggcactacacgatctgacctctctggttgagcagctcgaacacgatgccgatcgatccaaaagacctttgggccacgctgtcaacgacactgcagcgccaaatcgtcagcgaggtcgccgcggtgctggcggaggcaagtcatgaaatccgagctgatcaaaccgatacacctggcgcgacgggcggtcgtgtacatccgg

SEQ ID NO: 1850 - DNA, 260 bp, Artificial Sequence
  Description of Artificial Sequence: Synthetic polynucleotide
gacggcgcagcatcggacaactcacccacggaggaggttgccgatgaccagacgaccgcggccgacgtcccaactctcgctcgctctctctgttccgcttcaggacatcgccgttccggacgaagtcgtgcaagtactggcggatctcctcttggaagctgtgggcgcccatctcgacatggagaacagggaggaggcccatgagcaccaagatcaccgttgatcatctgggccgcggtgccgcgatctatgttcgccaa

SEQ ID NO: 1851 - DNA, 260 bp, Artificial Sequence
  Description of Artificial Sequence: Synthetic polynucleotide
ggcggcgcagcatcggacaactcacccacggaggaggttgccgatgaccagacgaccgcggccgacgtcccaactcttgctcgacctcacggttccactcccgggtctcgtggttccggacgaggtcgtgcaggtcctggcggacctcctcctggaagccgtcggagcccggctgggcacgaagaaaaaggaggacggccatgagccccaagatcaccgctgatcacctcggccgcggtgccgcgatctatgtccgccag

SEQ ID NO: 1852 - DNA, 260 bp, Artificial Sequence
  Description of Artificial Sequence: Synthetic polynucleotide
tcgaaagccttaaggaactcatccaaatccaccgagcagcacgctgaacgattcgatccgcacccgcgtcactcaccggatgcgtacctctgttccgcttcaggacatcgccgttccggacgaagtcgtgcaagtactggcggatctcctcttggaagctgtgggcgcccatctcgacatggagaacagggaggaggcccatgagcaccaagatcaccgttgatcatctgggccgcggtgccgcgatctatgttcgccaa

SEQ ID NO: 1853 - DNA, 260 bp, Artificial Sequence
  Description of Artificial Sequence: Synthetic polynucleotide
aaatcccgtccttcgaggaagaaggagaaggatgatgcgaagcaggcgacatcaaaatcgcgaccaactcgttctgcagttggagcgccaaaatcttcaggttccggcggtcaagaacgtcaaagggttggtggaagcgctggcggatcttctgctggaagctatggacgcgaacagaatgacgaagacgggaggcgttgatgaacacgaagatcacgcctgaccatcttggccgcgccgctgtggtctatgtccgccag

SEQ ID NO: 1854 - DNA, 260 bp, Artificial Sequence
  Description of Artificial Sequence: Synthetic polynucleotide
aaatcccgtccttcgaggaagaaggagaaggatgatgcgaagcaggcgacatcaaaatcgcgaccaactcgttctgcagttggagcgccaaaatctacaggttccagcggtcaagaacgtcaaagggttggtggaagcgctggcggaccttctgctggaagctctggaagcgaacagaatgacgaagacgggaggcgttgatgaacacgaagatcacgcctgaccatcttcgccgcgccgctgtggtctatgtccggcaa

SEQ ID NO: 1855 - DNA, 260 bp, Artificial Sequence
  Description of Artificial Sequence: Synthetic polynucleotide
gtgcccgtggcggcgaccgagccactcgccttgccgcgcgctcccacaaaattgagcgttgaagctttgtttgatctactaaatgtggtagatatagagcatcatgagcacggcacccgaagatctttggacgacactgccggtgacgctaaggcgccagatcatcggcgatatcgccgtggttctggcggaggtctttcgtgatgtccgagttgattcagccgatacatctgaagcgcaaggcagttgtctacatccgg

SEQ ID NO: 1856 - DNA, 260 bp, Artificial Sequence
  Description of Artificial Sequence: Synthetic polynucleotide
agctctcgtccttcgaggaagaaggagaagggtaatgcgaaacaggcgacatcaaaatcgcgaccaactcgttctggagttggagcgtcaaaatcgccagattccggtggtcaagaacgtcaaaggactggtggaaacgctggcggatcttctgttggaggctttgggagcgagcaaaacggcgaagacgggaggcgtagatgaacacgaagatcacgtctgaccatctgggccgcgccgcgattgtctatgtccgccag

SEQ ID NO: 1857 - DNA, 260 bp, Artificial Sequence
  Description of Artificial Sequence: Synthetic polynucleotide
attccagaggaggatgcgcatgccctgccgacccaaacgcctctcgcagccgaaacaaccgaagcccaagcagctctgcttgccgttggacgacagccggaaccgtcccccggcagcaccagcgacacccgcaattctggaggccttggccgagctgctgctggtggccgcgaacaagatggcggagggcgcgcaaaatgatgcatgcaaagatcaccgttgagcatctcgcccgcagtgcgctcgtttatgtccgtcag

SEQ ID NO: 1858 - DNA, 260 bp, Artificial Sequence
  Description of Artificial Sequence: Synthetic polynucleotide
gcaagatcccgtccttcgagaaagaaggagaagggtgatgcgaagcaggcgacatcaaaatcgcgaccagctcgtcctacagctggagcgtcaaaatcttcaggttccggtcaagaacgtcaaagggttggtggaagcgctggcggatcttctgctggaagctttggaggtgaacaggacggcgaagacgggaggcgcagatgaacacaaagatcacgtctgaccatctcggccgcgccgctgtagtctatgtccgtcaa

SEQ ID NO: 1859 - DNA, 260 bp, Artificial Sequence
  Description of Artificial Sequence: Synthetic polynucleotide
caagcaaccgcaatcgaatattatgagcaagaggcaaatcagattaagctgagtatggaggctctactcgagcttttatcgacagcggattgtcccgacgcacatgagcatggatccagccgatctttggtcgacgctgacgcccgcgctccgacgccagatcgtcgaagacgtcgccgcaattttggcggagatccctcatgaagtccgagctggtcacaccaagccacttggcgcgcaaagccgtagtctacatccgg

SEQ ID NO: 1860 - DNA, 260 bp, Artificial Sequence
  Description of Artificial Sequence: Synthetic polynucleotide
cgggcgcagctctcacgagcaagcgctgagccgggcaagacagaggggcgagcgacattggttagtttgccgaacgaagctgccgccaccgggatggttccgagcggacggccgcatgagatcacgatgcttctggcgagcctggtgctctcgacccgtcatccgtcaggtctgtcgccaggtgatggaggatatcgagcatgtccatgaacagcgagtctcatcaaaagatcacaagcgcacacctgtcacgcatggcg

SEQ ID NO: 1861 - DNA, 260 bp, Artificial Sequence
  Description of Artificial Sequence: Synthetic polynucleotide
cccgtgtcagcgacacagggatatgtcgaagccacgaatcagattaaacttagcgttgaggcagttcgggatcttatcgcggtggcggaaactctcgaaggtcatgatgatcgaaccgaagaacctgtgggcgacgttatcacccgcgttgcggcgtcagattctcgacgacgtcgccgcagttctggcggaggtatgtcatgaagtccgaactggtcaagcccacccatctggcacgcagagcggttgtttacgtccgt

SEQ ID NO: 1862 - DNA, 260 bp, Artificial Sequence
  Description of Artificial Sequence: Synthetic polynucleotide
cccgtgtcagcgacacagggatatgtcgaagccacgaatcagattaaacttagcgttgaggcagttcgggatcttatcgcggtggcggaaactctcgaaggtcatgatgatcgaaccgaagaacctgtgggcgacgttatcacccgcgttgcggcgtcagattctcgacgacgtcgccgcagttctggcggaggtgtgtcatgaagtccgaactggtcaagcccacccatctggcacgcagagcggttgtttacgtccgt

SEQ ID NO: 1863 - DNA, 260 bp, Artificial Sequence
  Description of Artificial Sequence: Synthetic polynucleotide
tctattgcagcaacagaatacctgcatgacaaaagcgatcaaacaaaattgagtattgaggcgttacttgatattatcaatgtgtcagactgtattcatgacagcaaatgcgaatccgaaggacctctggaaacaactaccgtcgtccctccgacggcagattgtcgacgatgtcgcagcggttctgacggaggttctgcgtgatgtcagagctgatcaaacccacccatctggcacgtaaggcggtcgtctatatccga

SEQ ID NO: 1864 - DNA, 260 bp, Artificial Sequence
  Description of Artificial Sequence: Synthetic polynucleotide
cggcacaggtcctcactccgaaggccacgccgcaatacgctttcatggtgtattgaacggcctcgcgatcaaactctcgcacgctctgtgcaccgaagttgccgtcccagccgtgtttgattccaactcagtgcgggataacggtgcgctcgtacgcgtgctggccaacctcgtgctgcgcgcccacgaggagcttgcccatgtctactaactccgctcagaaggtcacctcggaacatctccggcgagatgcctttctt

SEQ ID NO: 1865 - DNA, 260 bp, Artificial Sequence
  Description of Artificial Sequence: Synthetic polynucleotide
gggtcaggcccgccccgaggggctcggcgccatcgtctatcacggcatgctaaacggattgacgctgatcctgacgagcccgcccgttgcgtccttcgtccagagtgccccggcaggcgccgtcgcccccatcccgaacaaccgtcaattcgtgcgcctgctcgccaacatgctgctgcgaacccagtcggaggtggtccatgtttactgaaacccatcagaaggtcactgccgatcatctcagccgcgatgccttcctc

SEQ ID NO: 1866 - DNA, 260 bp, Artificial Sequence
  Description of Artificial Sequence: Synthetic polynucleotide
ggcttgcgcaaggcggatgggcgccatcgtctttcacggactatggcgcggcctggccgtgctgatcacgccagagcagtccacgatagcgcgacagcagtcggcgcctcggtccacgacaacttcagtggtcgcgcacgatcgccagctcgtgcacatgctcgccaatatggtgctggcagcagagacaggaggaagccatgtctactgataacgccatgaagattagtgccgatcacctgcggcgcgatgcatttctc

SEQ ID NO: 1867 - DNA, 260 bp, Artificial Sequence
  Description of Artificial Sequence: Synthetic polynucleotide
cgacacaggtcctaactcagaaggccacgcggccatacgctttcatggcctgttgcacgggctggcgatccaacgcccggacgcttcgcgcatcgaggctcccactccaaccgtgcctgcttccaactcagtgcgggataacggcgcgcttgttcgcgtgctcgccaacctcgtactgcgcacccacgaggagcttgcccatgtctactaactccgctctgaaggtcaccgctgaacatctgcggcgtgatgcgttcctc

SEQ ID NO: 1868 - DNA, 260 bp, Artificial Sequence
  Description of Artificial Sequence: Synthetic polynucleotide
tgcttgcgcgaggcgcatgggcgccatcgtctttcacggactgtggcgcggcctggcagtgctgatcgcaccacctcaatccgcgatagcgcgacagcagtcgacgcctcggttcaagacaacttcaatggtcgcgcacgaccgccagctcgtgcacatgctcgccaatatggtgctggcagcagagacaggaggaagccatgtctactgataatgccatgaagattagtgccgatcacctgcggcgcgatgcatttctc

SEQ ID NO: 1869 - DNA, 260 bp, Artificial Sequence
  Description of Artificial Sequence: Synthetic polynucleotide
cggtcaggcctgcgccaaggacatgggcgccatcgttttccacggcctttggcaagggctggcggtgctgatcgcgcagcctcccccgccgacgcatcggcggctggaatcacggcctacggcttcggtcgcagtgcacgatcgccagctcgtgcacatgctcgccaacatggtgctggcagcagagacccgagggaaccatgtctactgacatcgccataaaggttgacgccgaccatctgcggcgtgatgcattcctc

SEQ ID NO: 1870 - DNA, 260 bp, Artificial Sequence
  Description of Artificial Sequence: Synthetic polynucleotide
ggcttgcgcgaggcgcatgggcgccatcgtcttccacggactgtggcgcggcctggcagtactgatcgcaccacatcaatccgcggtagcgcgacagcagtccgcgcctcggttcaagacaacttcaatggtcgcgcacgaccgccagctcgtgcacatgctcgccaatatggtgctggcagcagagacaggaggaagccatgtctactgataatgccatgaagattagtgccgatcacctgcggcgcgatgcatttctc

SEQ ID NO: 1871 - DNA, 260 bp, Artificial Sequence
  Description of Artificial Sequence: Synthetic polynucleotide
ggcttgcgcgaggcgcatgggtgccatcgtctttcacggactgtggcgcggcttggcagtgctgatcgcaccgcatcaatccgcggtagcgcgacagcagtcagcgcctcggctcaagacaacttcaatggtcgcgcacgaccgccagctcgtgcacatgctcgccaatatggtgctggcagcagagacaggaggaagccatgtctactgataatgccatgaagattagtgccgatcacctgcggcgcgatgcatttctc

SEQ ID NO: 1872 - DNA, 260 bp, Artificial Sequence
  Description of Artificial Sequence: Synthetic polynucleotide
ggcttgcgcaaggcggatgggcgccatcgtctttcacggactatggcgcggcctggccgtgctgatcaagccagagcagtccacgatagcgcgacagcagtcggcgcctcggcccacgacaacttcagtggtcgcgcacgatcgccagctcgtgcacatgctcgccaatatggtgctggcagcagagacaggaggaagccatgtctactgataacgccatgaagattagtgctgatcacctgcggcgcgatgcatttctc

SEQ ID NO: 1873 - DNA, 260 bp, Artificial Sequence
  Description of Artificial Sequence: Synthetic polynucleotide
cggcaccccgcgcgccgagggcgccgcagcgctgcgctatcacgggatgctgcatggacttcctgtactcgtgaagtcaacggcggccatagacgctacctcgcgtcaccaggcgcagcgtatggacgcctttccggctggcgacgagtttgtgcgtttgctggccaacctcgttctacggacccattcggagctcgcccatgtctactgaacggtatcagaaggttacgcacgaccacttgcgccgtgatgccttcctc

SEQ ID NO: 1874 - DNA, 260 bp, Artificial Sequence
  Description of Artificial Sequence: Synthetic polynucleotide
ggcggccgtcaccgctcgcccgggcgtgcactcttcctgttcaaagggatggcggcctggatgcgtggcgtcagcgaaacggccccgagtccggccgccgccgctctgcgcaatgagtcgaggttaccggcggggatggaacagcacctgatcaatctggtcgccagcatggcgctggcgacggcacgggagagtaggccatgatgggtgagcagcacgcaaaaatacaggcgcgacacctgaagagaaatgcctatctc

SEQ ID NO: 1875 - DNA, 260 bp, Artificial Sequence
  Description of Artificial Sequence: Synthetic polynucleotide
gagaaacgcaatgggccagctgccaaggggtgttccagcacgaccgcaatcgccggcggtgacgccgcgccagatgaacatggtgttcgacaacgtcgagcttcagggaatgaacacggcgcaacgcgcaaaggtaatcacgcatcttgcaagcctgctgatccaagccgccggcgcaaccaccgggaaggagcgtgacgatgacgaacgctgatcgtttgccggcgccccttctccagcgcaaggcagtagtttatgtc

SEQ ID NO: 1876 - DNA, 260 bp, Artificial Sequence
  Description of Artificial Sequence: Synthetic polynucleotide
acgtcagaaattccttgtgttcctgaaaataaaggagttgaacacaggaaaaacaataatgatacaaaagcatctactaccaaccactcaaccagccaacaaagaaaggctaagtcgtctaataaaactaacagcaaggttagtagacaagatactcgtaagcaaaagtctcaacgagtcgatagtaaggagtaaaccagatgaatagtaaagttaggacgacccatctggaacgccatgctgttgtatatttaagacaa

SEQ ID NO: 1877 - DNA, 260 bp, Artificial Sequence
  Description of Artificial Sequence: Synthetic polynucleotide
ataacgtccgaatcttcttgtgttcttgatgatattgaagtcgaacacaagaaaaaaaatgagaaaaaagcatctactagcaaccgctcaagccaaaaacgaagaaaggctaagtcgccttataaagctaacagcacggttagtggacaaaatactctccactcaacagacagagaaagcgataactaggagtgaaccagatgaataataaaattagttcaacccatctggaacgccgtgctgttgtgtatttaagacag

SEQ ID NO: 1878 - DNA, 260 bp, Artificial Sequence
  Description of Artificial Sequence: Synthetic polynucleotide
gaggaagaaagccccggaggattcggcaatgagaaagcagtgtcgtgcgcaaatcgatctgttccttcccctaacccggcccggcgatatgagtggtgccgaacgccagaaggctatggcgcttctgcgagtattgctaatggaagcggcggcgcagccggccaacgagcctcaggccaacggcaaaaagggagcaggcaatgagtaagatcacgcccgtgcatctggcccgtgccgcattcgtgtacatccgccaatcc

SEQ ID NO: 1879 - DNA, 260 bp, Artificial Sequence
  Description of Artificial Sequence: Synthetic polynucleotide
cgctcggttcaagaagccgaagggataagccatgagaaagcaatttcgcatgcaattggatctgttcgtgacagcccggccggtagacctgagcgacacccagcgccgggaagccttaacactccttcaattactgttgacggaagcggcggcaaagctggccggcaagcggttcgccgacggcggaaaggaggcgggcaatgagtaagattaccgccgaccatcttagccttagcgccttcgtctacgtccggcagtcg

SEQ ID NO: 1880 - DNA, 260 bp, Artificial Sequence
  Description of Artificial Sequence: Synthetic polynucleotide
tgctcggtgcaagaagccgaagggataggccatgagaaagcaatttcgcatccaattggatctgttcgtcacagcccggccgatggatctgagcgacacccagcgccgggaagcattgacactcctgcaactattactgacggaagcggcggtaaaactagccgccgagcggtgcgtcgacggcagaaaggaggcggacaatgagtaagatcaccatcgaccatcttgccctgagcgccttcatctacgtccggcagtcg

SEQ ID NO: 1881 - DNA, 60 bp, Artificial Sequence
  Description of Artificial Sequence: Synthetic oligonucleotide
ggcggtgcaaaatcgggccgcggtgggcgtgcgctgctttctgggctcctttcctgcggt

SEQ ID NO: 1882 - DNA, 260 bp, Artificial Sequence
  Description of Artificial Sequence: Synthetic polynucleotide
cgagatcatcgaggaaatctgcgagatcaaccgcgaactattgcgccgccgcgaggcgctctgaggggcgccggtgaaccagtctccgctgtcactcacccacatcatcgatccgcaatcggccggcgtactcatcgccaacatgctcgaggcctggctcaccgccgggcccgcgctggagctgaccgaggaggccgccgatgaacaccaagatcaccccccaacatcaaagcaagccggcgtacatctatatccggcag

SEQ ID NO: 1883 - DNA, 260 bp, Artificial Sequence
  Description of Artificial Sequence: Synthetic polynucleotide
attcccggagacacccatgccgcgccgaccgacaccccagcaacccgacctcttcgacccgccatcggatcccgagcggttcccgacgccgcaatggcagagcttgcccgacgaggtgcggctgacgctgaccgagttgatggcccgcttgatcctcgaccacgccatcgacgcggcccgccaacggaaggacgcgggacatgatgcatgagaagatcggaccgcatcatctggagcgcaaagcgctcctctatgtgcgg

SEQ ID NO: 1884 - DNA, 260 bp, Artificial Sequence
  Description of Artificial Sequence: Synthetic polynucleotide
caacgcgatgatggagtcgcattggaggaagtcgatgaacaagcacgacacgcccgcaccggcctcgggcagacagatgagcctgatcttcgagccccggagggtggacgggatgagcgaggcggaacggacgaaggccgtaatcacgcttgctcaaatcctgatgcaagccgctggcctcgtcgtcgaggagctcggcgatgaccggcactgatttaatcccggcgcaactgctgaagcgcaaggccgtcgtctacgtg

SEQ ID NO: 1885 - DNA, 260 bp, Artificial Sequence
  Description of Artificial Sequence: Synthetic polynucleotide
cgagatcatcgaggagatctgcgagatcaatcgcgaactattacgccgccgcgaggcgctataaggggcgtcggtgagccagtcgccgctgtcgctcaccgactccatcgacctgcaatcggccggcgtactcatcgccaacatgctcgaagcctggctcaccgcagagcccgcgctggagttgaccgaggaggccgtcgatgaacaccaagatcaccccccaacatcagagcaagccggcgtacatctatatccgccaa

SEQ ID NO: 1886 - DNA, 260 bp, Artificial Sequence
  Description of Artificial Sequence: Synthetic polynucleotide
cattcgggaggtctcaatggcttacaagtccaaggtgttgcagctcgatctgttttcctgtccccgcaattccgcgataaccccgacaccaagatgggacacgctgccagcgcagacgcgccagacattgacgtcgctgatcgtgcgcctgctgctcgaccacgtcaacgatcccgtcatggaacagcgggaggtgcgtgatgatctgtgagaagattgggccacagcatctcgaccgcaaggcgatcctgtatgtgcgg

SEQ ID NO: 1887 - DNA, 260 bp, Artificial Sequence
  Description of Artificial Sequence: Synthetic polynucleotide
ccgagcgcaatcagattcgcatgggaggaagtcgatgaaacagaacaacgtgtcagctccgatcgcgggcaggcagatgagcctgatattcgaaccccgcagattggacgggatgcgcgacgcggagcgggcgaagacagtactgcttcttgcccaaatcctgatgcaggccgccggcctcgtcgtcgaggagttgggcgatgacgaagtctgatctgatcccgacggtgctgctgaggcgcaaggccgtcgtctatgtg

SEQ ID NO: 1888 - DNA, 260 bp, Artificial Sequence
  Description of Artificial Sequence: Synthetic polynucleotide
cattcgggaggtctcaatgccgcgcaagtccaagacgttgcaactcgacctgttctcctgcccacgcgatttcgagatatccaagacaccacggtgggacaccctgccagcgcagacacgccagacgttgacgtcgttgatggtgcgcctgttgctcgagcacttcgacgatcccgttgcggagctgcgggaggtgcaagatgatctctgagaagatcgggccgcagcatctcgagcgcaaggcaatcctgtatgtgcgg

SEQ ID NO: 1889 - DNA, 260 bp, Artificial Sequence
  Description of Artificial Sequence: Synthetic polynucleotide
ccaagcgagaatggaatcgcacgggagaaagtcgatgaaacagcacaacgtgcctgcaccgacctcgagcaggcagatgagcctgatattcgaaccccacaggctgggggggatgaacgaagtggagcgggcgaaggccttgctgacgctcgctcaaatcctcatgcaggccgccggtctgatcgtcgaggagctcgatgatgaccagcactgatctgatcccaactgcgctcttgaagcgcaaggccgtcgtctatgta

SEQ ID NO: 1890 - DNA, 260 bp, Artificial Sequence
  Description of Artificial Sequence: Synthetic polynucleotide
cgaagtggacgtagaatcactcaggaggaccatgatgagatcccgcaatacgctggtgccggcgtcgggccggcagctcgacctgatattcaaaacccggatgctcgacggactgagcgacaaggatcgcaagaaggcgatttcaacgctggcttgcctgctgatgcaggccgcaggcctcgtcgtcgaggagctcaacgatgagcaacactgatttgattccgacagcgctgctcgcgcgcaaagccatcgtctacgta

SEQ ID NO: 1891 - DNA, 260 bp, Artificial Sequence
  Description of Artificial Sequence: Synthetic polynucleotide
aagccacatgacccagtcaccgcacacgaagctcctgtcgacgatctcaagtgcgccgcgccctacgacgccgcgccagatgaacatggtgttcgagtcagcagtaacccaggacctgaccgcgagcgagcgggccagcgtggtcgcgcaactggccaccctgcttctgcaggccgccggccggcccacggaggatgacgatgacgaactctgaactgctgcctgccaccgtgctgcggcgcaaggccgtcgtctacgta

SEQ ID NO: 1892 - DNA, 260 bp, Artificial Sequence
  Description of Artificial Sequence: Synthetic polynucleotide
aatcggggagacttcgatgccacgcacgccagcccatcagttcgagttgttctccgctccgcagggaaaggagaagttgagcttgccgcagtggcaggcgctgcccgagggaatacgccagacgctgtccgaactgatggcgcaactgttgctcgaccacgtcgccgacgaaagcgcgcctctcccgggggagatgcggcatgatgcatgagaagatcaggccacatcatctggagcgcaaggcggtcctctacgtgcgg

SEQ ID NO: 1893 - DNA, 260 bp, Artificial Sequence
  Description of Artificial Sequence: Synthetic polynucleotide
ccgcgtgaaggaggggatcatgcaaccaagacgccacttgcaacggggcctgttcgaggaggatcgccagacgccggagattccggcgtcgcagagaagcactctcgtccgcctgatcgaggggctgctggtcgaggccctcgccgacggcgccaatatcgagacgggcacgccaaccacagagacgagggaggccgctgatgagcaagatcacgcctgagcacctcgcccgtcaggccgtcgtctacatccgtcagtcg

SEQ ID NO: 1894 - DNA, 260 bp, Artificial Sequence
  Description of Artificial Sequence: Synthetic polynucleotide
catgagccatcatgtacccggacatcgccgacggttgacgacatcggcatcacttcagccatctcccccacgccagctgagcctgaccctcgagtccccggtccttcgggacatggcctcgagcgaacgggccgccgtggtcgcacggctggcaacgctgctgctgcaggcagccggccttcaaaccgaaaggagtgatcatgacgacctctgatctgttgccggccgcagtgctgcgtcgcaaagctgtcgtctatgtg

SEQ ID NO: 1895 - DNA, 260 bp, Artificial Sequence
  Description of Artificial Sequence: Synthetic polynucleotide
tgccgcggcatgaccatgggaacgccacgcgtcgatcttgcgacgctaatcgaattgaacaggctggtctctggcggcagcaaagcggcacccttccgaagtggacgtagaatcactcaggaggaccatgatgagatctcgcaatacgctggtgccggcgtcgggccggcagctcgacctgatattcgaggagctcaacgatgaccatcactgatttgattccgacagcgctgctcgcgcgcaaggccgtcgtttatgtg

SEQ ID NO: 1896 - DNA, 260 bp, Artificial Sequence
  Description of Artificial Sequence: Synthetic polynucleotide
cgaggtgaacatagaatcactcaggagcaagatgatgagatcccgcaacacgctggtgccggcgtcgggccggcagctcgacctgatattcaaaacccgcacgctcgacggactgagcgacaaggatcgcaagaaggcaatatcaacactggcttgcctgctgatgcaggcggccggtctggccgtcgaggagctcaacgatgaccagcactgatctgattccgacagtgctgcttgaacgcaaggccgtcgtttacgtt

SEQ ID NO: 1897 - DNA, 260 bp, Artificial Sequence
  Description of Artificial Sequence: Synthetic polynucleotide
cgaagtggacgtagaatcactcaggaggaccatgatgagatcccgcaatacgctggtgccggcgtcgggccggcagctcgacctgatattcaaattccggatgctcgacggactgagcgacaaggatcgcaagaaggcgatttcaacgctggcttgcctgctgatgcaggccgcaggcctcgtcgtcgaggagctcatcgatgagcagcactgatttgattccgacagcgctgctcgcgcgcaaagccatagtctacgtg

SEQ ID NO: 1898 - DNA, 260 bp, Artificial Sequence
  Description of Artificial Sequence: Synthetic polynucleotide
cgaggtgaacatagaatcactcaggaggaagatgatgagatcccgcaacacgctggtgccggcgtcgggccggcagctcgacctgatattcaaaacccgcacgctcgacggactgagcgacaaggatcgcaagaaggcgatatcaacactggcttgcctgctgatgcaggcggccggtctggccgtcgaggagctcaacgatgatcagcactgatctgattccgacagtgctgcttgaacgcaaggccgtcgtttacgtt

SEQ ID NO: 1899 - DNA, 260 bp, Artificial Sequence
  Description of Artificial Sequence: Synthetic polynucleotide
cgaggtggacgtagaatcactcaggaggaagacgatgagatcccgcaatacgctggtgccggcgtcacgccggcagctcgacctgatattcaaacctcggacgctcgacggagtgagcgacaaggaccgcaagaaggcggtagcaactctggcttgcctgctgatgcaggcggccggtctggtcgtcgaggagctcaacgatgaccagcactgatttgattccgacagcgctgctcgcgcgcaaggccgtcgtttatgtg

SEQ ID NO: 1900 - DNA, 260 bp, Artificial Sequence
  Description of Artificial Sequence: Synthetic polynucleotide
ctacgttttctgcagagcgactcacgccagccaggagacgaccatgcagcgcaggcaatgccgaaccgaccagccagacctgttttccacgacggctccaacgccgagccttccgggcgaagtgcgggaacgaaccctcccgctgatagaagccttgttgagggaagcggtggtgagccagacgggacgggaggcagatcatgaagatcaccgctgaacatctcgcgcgcggcgcctatgtctatgtccggcagtcgacg

SEQ ID NO: 1901 - DNA, 260 bp, Artificial Sequence
  Description of Artificial Sequence: Synthetic polynucleotide
ggactcacggccatccaggaggcgcgccatgaaggcactaccacgaccctcgtcgctatcgatgctgacccagcagctgagcatgccgctcgatacgccgcagatgcgaggcctgagcgaggcgcagcgaagcgccgttgttgccaggctggcgaccctcttgatggccgcagccggcgtcgcggcgaaggaggccagcgatgacgggcaatgatctccttccagtcacggtgctcaagcgcaaagctgtggtgtatgtc

SEQ ID NO: 1902 - DNA, 260 bp, Artificial Sequence
  Description of Artificial Sequence: Synthetic polynucleotide
ggtctcacccccatccaggaggcgccctgtgaaggcattaccaccaccctcgacgttaccgatgctggcccgtcagttgagcatgccgctcgatatgccgcagattcggggcctgaccgacgcggaacgcagcacggttgtcgccaagttggcgaccctcctgatggcggcggccggcgtcgcggcgaaggagccgagcgatgacgggcaataatctcattccggccacggtgcttaatcgcaaagctgtcgtctacgtt

SEQ ID NO: 1903 - DNA, 260 bp, Artificial Sequence
  Description of Artificial Sequence: Synthetic polynucleotide
ggtctcacccccatccaggaggcgccctgtgaaggcattaccaccaccctcgacgttaccgatgctggcccgtcagttgagcatgccgctcgatatgccgcagattcggggcctgaccgacgcggaacgcagcacggtcgtcgccaagttggcgaccctcctaatggcggcggccggcgtcgcggcgaaggagccgagcgatgacgggcaataatctcattccggccacggtgcttaatcgcaaagctgtcgtctacgtt

SEQ ID NO: 1904 - DNA, 260 bp, Artificial Sequence
  Description of Artificial Sequence: Synthetic polynucleotide
cgacgagccttgctccacggccgtcgtgtgagccgccgtgcaagctgacacgtgaggcactggaggaactgatcgccctggccgacgagtgcggggtggcgccatgcccatgcgacccgaacgcgtctggagacgcttgcccgacgaactccgcgccgcgatcgccgaagacgtcgccgccatcctcacagaggtgatctatgagatcggaacttatcaccgaccggcatctggcccgccacgcggtcatctacatccgc

SEQ ID NO: 1905 - DNA, 260 bp, Artificial Sequence
  Description of Artificial Sequence: Synthetic polynucleotide
ggactcaccgccatccaggaggcgccctatgaaggcattaccaccaccctcgacgttaccgatgctgacccgtcagttgagcatgccgctcgatatgccacagattcggggcctgaccgacgcggaacgaagcacggtcgtcgccaggttggcgaccctcctgatggcggcggccggcgccgtggagaaggagccgagcgatgacgggcaataatctcattccggccacggtgcttaatcgcaaagctgtcgtctacgtt

SEQ ID NO: 1906 - DNA, 260 bp, Artificial Sequence
  Description of Artificial Sequence: Synthetic polynucleotide
gatagcaacgtcgtccaggaggaccgtcatgaggaagtcattcgacctgatcttaacgccccgcccgccgcgccagctctgcattctactggacccgcccgagttgaaggggatcaaggccaccgaacgaagcgcggtcaccataaggttggcgcggcttctcatggaagccgccggcgcgataacggtggagaacggcaatgactgacgtcgatattttgccgccttcaatattaaagcgcaaggccgtggtttatgtt

SEQ ID NO: 1907 - DNA, 260 bp, Artificial Sequence
  Description of Artificial Sequence: Synthetic polynucleotide
cggagagatgtccatgccacgccagttcatgacatatcagttcgatctgttctcgggtctacacagcgggaggacagcggcgatgccgcaatggcaggagttgccggaagggacgcgccaggccctgacggcgctcatggtgcgcctgctcatcgaccacgcaaacggcggacgcgcctctcaacggaaggaggccggtcatgatgcatgagaagatcgggccacaccatctggagcgcaaggccatcctgtacgtccga

SEQ ID NO: 1908 - DNA, 260 bp, Artificial Sequence
  Description of Artificial Sequence: Synthetic polynucleotide
cggagagatgttcatgcctcgccagcccatgacatgccagttcgatctgttctcggccccgcagcgggggaagacggcagggacgccgcaatggtcggagttgccggaggagacccgccaagcgttgacggtgctcatcgtgcggctgttcgtcgatcacgcaaagtgcggacatgcctcccaacagaaggaggccggtcatgatgcatgagaagatcgggccgcatcatctggagcggaaggccatcctctatgttcgg

SEQ ID NO: 1909 - DNA, 260 bp, Artificial Sequence
  Description of Artificial Sequence: Synthetic polynucleotide
cggagagatgttcatgcctcgccagcccatgacatgccagttcgatctgttctcggccccgcagcgggggaagacggcagggacgccgcaatggccggagttgccggaggagacccgccaagcgttgacggtgctcatcgtgcggctgttcgtcgatcacgcaaagtgcggacatgcctgccaacagaaggaggccggtcatgatgcatgagaagatcgcgccgcatcatctggagcggaaggccatcctctatgttcgg

SEQ ID NO: 1910 - DNA, 260 bp, Artificial Sequence
  Description of Artificial Sequence: Synthetic polynucleotide
cggagagatgttcatgcctcgccagcccatgacatgccagttcgatctgttctcggccccgcagcgggggaagacggcagggacgccgcaatggccggagttgccggaggagacccgccaagcgttgacggtgctcatcgtgcgactgttcgtcgatcacgcaaagtgcggacatgcctcccaacagaaggaggccagtcatgatgcatgagaagatcgggccgcatcatctggcgcggaaggccatcctctatgttcgg

SEQ ID NO: 1911 - DNA, 260 bp, Artificial Sequence
  Description of Artificial Sequence: Synthetic polynucleotide
cggggagatgtccatgccacgccagtttacgacatatcagttcgatctgttctcgagtgcccacagcgggaagacgccagcgatgccgcaatggcagacgttgccggaaggaacacaacaggcgttgacggcgctcatcgtgcggctgctcgtcgaccactcaaacggcgagagcgcctcccagtcgaaggaggccaatcatgatgcatgagaagatcagcgcccaccatcttgaacgcaaggccattctgtacgtccga

SEQ ID NO: 1912 - DNA, 260 bp, Artificial Sequence
  Description of Artificial Sequence: Synthetic polynucleotide
cggagagatgttcatgcctcgccagcccatgacatgccagttcgatctgttctcggccccgcagcgggggaagacggcagggacgccgcaatggtcggagttgccggaggagacccgccaagcgttgacggtgctcatcgtgcggctgttcgtcgatcacgcaaagtgcggacatgcctgccaacagaaggaggccggtcatgatgcatgagaagatcgcgccgcatcatctggagcggaaggccatcctctatgttcgg

SEQ ID NO: 1913 - DNA, 260 bp, Artificial Sequence
  Description of Artificial Sequence: Synthetic polynucleotide
cggagagatgtccatgcctcgccagtccatgacatgccagttcgatctgttttcggctccgcagagggggatgaccgcaggcatgccacaatggccggagttgccggaggaaacccgccaggcgctgacggttctcatcgtgcggctgttcgtcgatcacgcaaactgcgagcgcacctcccagcagaaggaggccggtcatgatgcatgagaagatcgggccgcaccatctggagcggaaggctattctctatgttcgg

SEQ ID NO: 1914 - DNA, 260 bp, Artificial Sequence
  Description of Artificial Sequence: Synthetic polynucleotide
cggagagatgttcatgcctcgccagcccatgacatgccagttcgatctgttctcggccccgcagcgggggaagacggcagggacgccgcaatggccggagttgccggacgagacccgccaagcattgacggtgcttaacgtgcggctgttcgtcgatcacgcaaagtgcggacatgcctcccaacagaaggaggccagtcatgatgcatgagaagatcgggccgcatcatctggcgcggaaggccatcctctatgttcgg

SEQ ID NO: 1915 - DNA, 260 bp, Artificial Sequence
  Description of Artificial Sequence: Synthetic polynucleotide
cggagagatgtccatgcctcgccagtccatgacataccagttcgatctgttctcggccccgcagcgcgggaagacggcagggacgccgcaatggccggagttgccggaggagacccgccaaacgctgacggtgctcatcgtgcggctgttcgtcgatcacgcaaactgcgggcgcgtctcccagcagaaggagaccggtcatgatgcatgagaagatcggaccgcaccatctcgagcggaaggccatcctctatgttcgg

SEQ ID NO: 1916 - DNA, 260 bp, Artificial Sequence
  Description of Artificial Sequence: Synthetic polynucleotide
cggagagatgccgatgcctcgccagcctacagcctaccagttcgacctgtttctaattccaagcgaaggacagacagcgcccgtgccgccgtggcagaccttgccgcacgaggcacgccggaagctgaagcaactgatggcgcgcttgatcctcgatcacgtcgcgggagaaccgacaaactcaaaggagggcgcggatcatgatgcatgaaaagatcaggccgcatcatctcgagcgcaaggcaatcctgtatgtcagg

SEQ ID NO: 1917 - DNA, 260 bp, Artificial Sequence
  Description of Artificial Sequence: Synthetic polynucleotide
gctgccttgtcgttgctccgcgagcgagacaacggagggcggcatgagacaccccaaagcgaccgtgcaaccggacttgtttgcgccgacgcggccggaggccgcccttccgctggaggtggcgcaacggctcctgccgcttctggaacagctcctgctggaggtgctggcgagcgaaaccctggtgacggaggcgggcgatgagcaagatcacccctgaccacctcgcgcgtcatgcctacgtctacgtccgccagtcc

SEQ ID NO: 1918 - DNA, 260 bp, Artificial Sequence
  Description of Artificial Sequence: Synthetic polynucleotide
ggcttgcgcgaggcgcatgggcgccatcgtctttcacggactgtggcgcggcctggcagtgctcatcgcaccacatcaatccgcgatagcgcgacagcagtcgacgcctcggctcaagacaacttcactggtcgcgcacgatcgccagctcgtgcacatgctcgccaatatggtgctggcagcagagacaggaggaagccatgtctactgataatgccatgaagattagcgccgatcacctgcggcgcgatgcgtttctc

SEQ ID NO: 1919 - DNA, 260 bp, Artificial Sequence
  Description of Artificial Sequence: Synthetic polynucleotide
agtatttcggctgaccgccccgcgatctccgcctcggcgccgtccataaagcaagggcctcatcactcacccacacggtcaaatcaccacgttgacgcaggctttcattataggccgcccaattcgtcaccttaaacttctgcttggctatcttgtcccgtcggtcggcattgaacttatgcggcatcatcaaaaccccgatcaggagactgaaaaccaaagcccaatatcagtcgccgggtgatccgcgcaacaacgcc

SEQ ID NO: 1920 - DNA, 260 bp, Artificial Sequence
  Description of Artificial Sequence: Synthetic polynucleotide
gatgacgcaactgttatcgaggaggcatgtgatgaaagcgcgacagcaccacgccatcgtaaaacaaccctgccagctcagcatgacgttggaaacgcccgagctgacgcggatgagcgccgtggaacgacaagcaatgattttgcgccttgcgcaattgatcctgcaggcgggcgggacgacgatcacggaggacagcgatgacgcacgttgatcttcccgcatcgcttttgaagcgtaaggccgtggtttatgtccgt

SEQ ID NO: 1921 - DNA, 260 bp, Artificial Sequence
  Description of Artificial Sequence: Synthetic polynucleotide
cgcgtcagtagcaatctgaccgcacgggaatgggattgtctgctttgggcgggcgagggaaagacgaactgggaaacttcggcgattcttggaatctcaagatcaaccgtgaccaagcatatcatggcggcgcgcgcgaagcttggtgcagtcagcaaagctcatgccattgccacggcgattcggacgaagctccttcgctgaaagcgttaggtcaggccatcgtctacattcgtcagtcgaccgccggccagctcgcc

SEQ ID NO: 1922 - DNA, 260 bp, Artificial Sequence
  Description of Artificial Sequence: Synthetic polynucleotide
cgtaacaaccacactaaacaaaacatggatatttgtgtcccccctcctcgcagaggggggatttttttaactatacacatcatcgcgatgcaacactatactgtaatcggcaaaaaagatgaaccattaaacataaaaatattctcataataacgctgtcacaaagccgtgctatacttattctgaaaggagttgatagcatggctgaaataactataatacagccaagagaacagccccgcagaaaacttcgctgcggg

SEQ ID NO: 1923 - DNA, 260 bp, Artificial Sequence
  Description of Artificial Sequence: Synthetic polynucleotide
agagggcgcctgagaggctggcgagcgtggtgtaaagcgctgatgcggcgtaggattcggttgtgaagccaaccccatcacctcaaccgcgaacgccacgcccgccatgaccgacgatacgattccgcccttctcgtttccagggtactgtccagaatctttcgcacttttgatcaggcgacggctccggtttcagagagttgtggctgatagagcggtcgcatgttcatgtagcatttggtcgcgtccaggtgattgac

SEQ ID NO: 1924 - DNA, 260 bp, Artificial Sequence
  Description of Artificial Sequence: Synthetic polynucleotide
gcgacgacgcggaccaccaccggccagcagtgggacgaaccgaacggctgggcgccgctgcagtacctcgcggtgatggggctgcgccgctatagcgagccggagctcgcgcgcgatatcgcgacccgctggattcgcaccgacgttgcgtactatcagcgcaccggcgagctcgttggacctcaaagtataatagatgaatgcccgcagggctccgtccagcaagggcttcagccgaatggaagcgaaggctcgaccgc

SEQ ID NO: 1925 - DNA, 260 bp, Artificial Sequence
  Description of Artificial Sequence: Synthetic polynucleotide
aacaacgtgacatcgccctcgccagcccatgacatgccagttcgatctgttctccgccccgcagcgggggaagacggcagggacgccgcaatggccggagttgccggaggagacccgccaagcgttgacggtgctcatcgtgcggctgttcgtcgatcacgcaaagtgcggacatgcctcccaacagaaggaggccggtcatgatgcatgagaagatcggaccacaccatctcgagcggaaggccatcctctatgttcgg

SEQ ID NO: 1926 - DNA, 260 bp, Artificial Sequence
  Description of Artificial Sequence: Synthetic polynucleotide
caactcaaataacagcaactgcgggaataggaacaaatctttacttagcaaaaattgcaatggatatattagccaaaaaacaaaatattaataaagatggatttgcatagggtgttgtatgctctaaaagacttcttaatcaagcggttgagaagtctcttagaacacacaacctaaaaccgaagaaaggagcgcaagttatgagaaaaaacgagaaaataacagctctgtacgaacgactgagccgtgatgactttggc

SEQ ID NO: 1927 - DNA, 260 bp, Artificial Sequence
  Description of Artificial Sequence: Synthetic polynucleotide
ctggcggtggcaacaaaataggtggtgtagatcaacatcagttcgtgtgaaagcgccataatttcctctgtggctgattaagtcccgatttagggttatatcgttgaacgcgacatttttctatgccagatctgttaattaggtgttaattcgctatgctgtggctccacttaaccggggtgtaacgcaggagaagggctgtgaatctgagccagcgcgaacatatcgccaatgtggttgccagcgtcgagcaggcggca

SEQ ID NO: 1928 - DNA, 260 bp, Artificial Sequence
  Description of Artificial Sequence: Synthetic polynucleotide
ctgccatgcatagcgccggcgcaattcccatgcccgcagggctgaaattctacacgaaaacggtcaaaagtggccgtcgagggaagcaaccgcacgttgtctacctgctgatggacgacgatccgcccgtggacctgtcagaggtcgaaatgtttgcagacttgatgaaccgcaagtcggcggcttcgtaggaggaacaaatggtagtcaaaccccgtccgtccctctccaagccgcggtgcgtcatctacgctcgtgta

SEQ ID NO: 1929 - DNA, 260 bp, Artificial Sequence
  Description of Artificial Sequence: Synthetic polynucleotide
ggtaaaaatgcaagcaataaagatttatagcatgagagttgctatgttatgtaggctttatgatcttaaattaattaatgagaaggaatatacaaaaattaagaacaggttagaaaatgattataagaagagagatagaaagtagttaatcttgtgatataataacactgtagaaagatacaaaatgggaaggaggtaaaatgaatactaaagtaaaattaataaaagcttcaaatttaggagcaagaaatagaaatgca

SEQ ID NO: 1930 - DNA, 260 bp, Artificial Sequence
  Description of Artificial Sequence: Synthetic polynucleotide
ggctaccgcctcgtctatcaggtcgtggaacagcggatcgtcatttttgtcatcgcggtcggacgccgtgaggacagcgaaatctacacgacggcaaccgggcgcatcccggagacgccagccgaccggataaaacagcccagcggcaaaagtcgcaaaaggtaaagcttacgaaaaaccacctgtggggaaaagccgccatgacccgtgtcgcactctatgctcgctattcctcggacaaccagcgggcggcttctatc

SEQ ID NO: 1931 - DNA, 260 bp, Artificial Sequence
  Description of Artificial Sequence: Synthetic polynucleotide
gaacgaaccaggccgatgaaggacgaggaccgcaatggccaagctttgcaaaaggcgccatcctctgcgccttgaggtcggcttcgaggtcagacggggcagtcaagaagtcctgggacgcgcctacgagcgcctcctgcccctgcgcacctgttccctgccatcacgggcgcaggccgccatgtccaagggagcgtacgatgagaactccgcacctgagagccgtttcggcaccgcagaccctgcaggtcgccctttac

SEQ ID NO: 1932 - DNA, 260 bp, Artificial Sequence
  Description of Artificial Sequence: Synthetic polynucleotide
ggaggcgccgatgacccggcagacgcgtcatccgctcctgcaggtgcaggagtccttcgagatcacgcggttcagccccgaatgcctgatcgaggcctaccgccgcgtcgtacccatccaaaccaaagccatccggagagccgccgaacaccgccgatcccaaactcccgtccacaccacccgaagtcagggaggtaagcatgtctgatcgccgcattgccctttacgcgcgggtctccaccgaacagcaggcccgggat

SEQ ID NO: 1933 - DNA, 260 bp, Artificial Sequence
  Description of Artificial Sequence: Synthetic polynucleotide
tctccgggctgggggggccggggaggggaagcggtaagagcgacaacgatgaggcatggcgctgctgcaggaacttgtcggagccgtgccgggaagatccgcggatgtcgaacactccgcacccgttgcttgccggaccagatgcaaatgatgatcatgggtccgaagagcgaaccggatccagacgaaggagcctcgccatgagcaagggcaatcgcgtggcgatctacgcccgcttctcgaccgacctgcagcgggag

SEQ ID NO: 1934 - DNA, 260 bp, Artificial Sequence
  Description of Artificial Sequence: Synthetic polynucleotide
gagatgcttacatgtactatatataattttttattctctaataaagctataaaaccatatataatttttatttaccgacaaaaacttatataataaatacaaagcatagaaggaggacgaaaacatgctcatcaataaagaatacataaaagcatcattatctatcctaaacaaatataacgaaacgagggagcaataatatgcctgataacagaaaatacgcaatttacagccgcaaatccaaatttaccggcaaaggt

SEQ ID NO: 1935 - DNA, 260 bp, Artificial Sequence
  Description of Artificial Sequence: Synthetic polynucleotide
cgatcctgcggtttctgtcgacgagatctgggaagatgtttaccgcatcgcccgcaagattatccgggtcaagcgccgccgtgaagccgaagccgctgcacaggctgccaacaccccctgatcgtcatccgccctttccccgttgcccgtcaaccggttaaatgtcgtgtatacatacgacacagaccggaggaaacgtcatgctggtcgccatttacgcgcgccacagcaccgacaaacaggacacatccagcgccgat

SEQ ID NO: 1936 - DNA, 260 bp, Artificial Sequence
  Description of Artificial Sequence: Synthetic polynucleotide
cgatcctgcggtttctgtcgacgagatctggggagatgtttaccgcatcgcccgcaagattatccgggtcaagcgccgccgtgaagccgaagccgctgcacaggctgccaacaccccctgatcgtcatccgccctttccccgttgcccgtcaaccggttaaatgtcgtgtatacatacgacacagaccggaggaaacgtcatgctggtcgccatttacgcgcgccacagcaccgacaaacaggacacatccagcgccgat

SEQ ID NO: 1937 - DNA, 260 bp, Artificial Sequence
  Description of Artificial Sequence: Synthetic polynucleotide
cgagcgcgaagcgctgctcgaatctttgctgctggacgagccggagttgacgtttacgccgcgcggcattcccgaccctcgccttctgcgtctggtcggcatcctggcaaagcaggcggcacgggaatgctttgcagaggaagtgacgttatccaggcaaaggaggaagcgcacctcctgatgcggataggagccatgttttgaaagtcgcgatctacgcccgttattcttccgacaatcaacgcgacgcttccatcgcc

SEQ ID NO: 1938 - DNA, 260 bp, Artificial Sequence
  Description of Artificial Sequence: Synthetic polynucleotide
taacttaaagtttcaacaacaaaaggcaatcattgatgaacttaaaaaggcaagtttgattaccaatgaagaatggtatctttgcctaacaaaactactaaagataaataatgaaaaaagcaacaaatagcacggtattgacttgctatttattgctttttgagtgatgtatatagtaactaattataggaggtacaagaatgcaggaaaaacgagttatagttattgaaccaactcaagtaatccatgaagatataaac

SEQ ID NO: 1939 - DNA, 260 bp, Artificial Sequence
  Description of Artificial Sequence: Synthetic polynucleotide
atccgcgacttcgtccgcgcgatgtgggactggtttgtggcgcagacccgcacgcgctgcattctcacgggtgaagcggcgacgcagctcccgagcggccgagtcgtgggccgcgcgggcgagaagctgctcaagcgcgaccccgcggcgttccaagcacaagtctacggccccgaagccgcctgacaggagacccatccatgtcgctgccgtcccacggcttcaccatcctgcgcaacgcgcccgacagcgcccgcgga

SEQ ID NO: 1940 - DNA, 260 bp, Artificial Sequence
  Description of Artificial Sequence: Synthetic polynucleotide
cgacacagacgcgatggtgcattgctgcgcgaaaccgccccagcggtaacgccggaggagcttcgcacagccatgcttaagtttgtcgaagcactcgccatcgccgatgccagaggcgatcatctcaaatccgtcggcgcttcggctgaccgaaatgctgccatggatgcagatcgctgcaacaagaaggcttccgatacatgaggcgggccgctgtctatgcacgcttttcgaccgagctgcagaacgaaaaatccact

SEQ ID NO: 1941 - DNA, 260 bp, Artificial Sequence
  Description of Artificial Sequence: Synthetic polynucleotide
aattgctcacagagagccgactaaagccaacggtagcacgccgcgacggttgatggatgacgatctccaagtcccgcccatcgacgttggccgaccgcagggcagtatagaagcgcgctccaattttgatcgtggcccaagattggcaagaatggtcaaatctgtagactgatcacaaagctcaattctggagactccgaatgccccgtgtagctctgtatgcccgctattccgacgacaagcagagccctgcatccatc

SEQ ID NO: 1942 - DNA, 260 bp, Artificial Sequence
  Description of Artificial Sequence: Synthetic polynucleotide
tggtgctttagatttagataatctgcccgatccaacgccagcaaaaaatcaagagatgaaaaatagttttgacatggcaaaaacacaaattgagacggactaataaaagtgttataatatacttgaaatgatagtccaaacttaaattcaaaaatcaaagtttatatatgatatagaaaaattataatgaggttaatgctatgttaaaagaaaaaataaaagtatacctctatacacgagtatctacgtcaatacagata

SEQ ID NO: 1943 - DNA, 260 bp, Artificial Sequence
  Description of Artificial Sequence: Synthetic polynucleotide
gaccgagacgtacaacagccgaacggcttcttgtggtcgccgacgcgacccgcgaaccggttgcgcttgcgtcatcaaaacccgatccacgcctcgtcaatctggtccgactgctggcgcgacaggccgcgcgggacttcgttcgagccgaaactgatagccggacgcgagaccaccttccggagtaaggaggtcgcctcgtgaaggtcgcgctctacgcccgctactcatcagacaatcagcgagacgcttcaatcgag

SEQ ID NO: 1944 - DNA, 260 bp, Artificial Sequence
  Description of Artificial Sequence: Synthetic polynucleotide
ggtgaatcaaaaccaaacttgattcaatttagaggcgcgataggaagggcttaccataaaatttatgaacaaattatgccatataaagatgaactggattttcttggtgtaattaaaaattagggtcgtgaaattaaagttttgtattggtttacgaattaacaagcataagttaaaatattagttagagaggagaacttatgctttgttattcttatgtcagattcagtacaccagaccaagctaaaggtgatagttat

SEQ ID NO: 1945 - DNA, 260 bp, Artificial Sequence
  Description of Artificial Sequence: Synthetic polynucleotide
actcgtcggcacggtgcggaacgtcgggggcccggcaacagcagcatggagaactgctgttgccgggcccgggtctgagtagttgcggtacaggatgtagcgctgagattgatcatggtcgctatcacagcgaacggctccggtggggagcttccgggaaagatcgttgagcgggtgcgggggctggctacggtccggctgtgccggtggaatttctgactgacgagcaagccgctgcctacgggacgttcggtgaggtg

SEQ ID NO: 1946 - DNA, 260 bp, Artificial Sequence
  Description of Artificial Sequence: Synthetic polynucleotide
atgggaacttataagtttataatcgcactcagcccttcagaagtacttctcttgataagtgatactcctatgacaaaaaagagtatcaaaaacgaactagatgtatataaggctatgccatccatttatacggacaaagtaaaaagcatgaacgagaaatatgacataacatatcatgtggtagatttgagggaacaagaatgaatgcagtagagataattgatttcaataaacttgagtcaaaagatagattaaagaat

SEQ ID NO: 1947 - DNA, 260 bp, Artificial Sequence
  Description of Artificial Sequence: Synthetic polynucleotide
ctggaggaactggcggaaatcaccggccgggccggctccaatctgtcacgcaccctgaaaaccatggagaactacggtcttgtgcgactcgaaccggggcatgggcgtaagctcgcgcccaaggtggtgcatgaccgcgtggagctggcgttgcccctgatcgaccaccccaagatgaagaaagctatgggaggccgaccatgaacattcacagcccaaccactaccgcccgcgccgcgctctacctgcgcgtttcgact

SEQ ID NO: 1948 - DNA, 260 bp, Artificial Sequence
  Description of Artificial Sequence: Synthetic polynucleotide
acccggtctattaaagacaaggcctaatttaatctaagatttcataacacatataccgaaatctaaaaactagatagatctatattcaaagaatacaaatctttcatattattttgttgttttcgtattcaatgttagatagaatgtttttacagatacttctgttttgacattaaacacaataaagaggtgctaaatttttggagttaaaaaatattgtcaattcttacaacatcacaaatattttaggttatcttaga

SEQ ID NO: 1949 - DNA, 260 bp, Artificial Sequence
  Description of Artificial Sequence: Synthetic polynucleotide
aagtacaactgctgcacttataatcgcataccttatataacagaggaacttgtgcatattattcaaggctttacgccctcggaagagatcaacaagcaaatgctcacaaagactgttgagaagataacatttgataaaaacaaagtgataaccgttactttcaaaaacggcagaaaaatagcggcaaaggagggagaaatatgtcaagaccgatagaagcggcttcaaacgtcaagataattcctgcaatgtcctcggag

SEQ ID NO: 1950 - DNA, 260 bp, Artificial Sequence
  Description of Artificial Sequence: Synthetic polynucleotide
gaaatacaacgcctgcacatacagcagagagccgtatatcacgcaggagcttcaagacctgattgcaggacatgagccttccgaaacgattgatacggagcttttattgcagatcgtaagcagaataaccgttgatgaaaacaaggttatagcgatagagttcagaaacggaaagcgcatcgcatacaaggaggttaacaatgccgaagaataacgatatggcttccaatgttacgatgatacctgccctctcgcctgcc

SEQ ID NO: 1951 - DNA, 260 bp, Artificial Sequence
  Description of Artificial Sequence: Synthetic polynucleotide
agacataagcagtgaatgcgggaacgatcgccacgtatcgtccaaagatcacgcgacgccgttcgaactttctctgatacgtttcgtcgaagcccttgcgatcgcggacgcgaggcgcgatcatctcgcttcaagcgctccgttcatcccacaggcaactcccgagcggacgcggacattgcaggcgggagcgtcgacccatgactcgcgcggtcatctacgcaagattctcgactgaactccagagcgagaaatcgact

SEQ ID NO: 1952 - DNA, 260 bp, Artificial Sequence
  Description of Artificial Sequence: Synthetic polynucleotide
agaggaagggggagtgcttatgcaaatagggcggcctgtaccaaggataagggttattcctgtggggaatgttgccgatcacagaagggcctatgcccgggtggttgatattatacgccaggcctgccctgacaggcaggaaaacccgcaagggatgttgaaggaagtaaacatgaatcctgctatggggaagaagaaagatgaaggccgtgatttacgctagggtaagcacccaggaccaggcccttggtttttccctg

SEQ ID NO: 1953 - DNA, 260 bp, Artificial Sequence
  Description of Artificial Sequence: Synthetic polynucleotide
atttataacggaagaagaatttatcaaaatagatgatgaaaataaaaagacttttaatagatagattatgggcttgagctatagtagttcaagcctataattttttagatttttttatatgttcttacaagctaattaacttgctatgaggctggagtagaggtaacatgtgactaccttgaaagggaggagggtttatattgaagaaaataactgctattgcagcaaagaataaagtggatattcatgaaactgcatta

SEQ ID NO: 1954 - DNA, 260 bp, Artificial Sequence
  Description of Artificial Sequence: Synthetic polynucleotide
ttactcaacatgatttggctgaaaaaataggcataagtgcttcatatttaagcgagttagaacatgggacaaagtatccaaattcatttatgattatgaatatagcttgcgcactagatgtatgtccaaaatgtcttatagaatgcacaaaagaatgtaaagaaagaaatttagaaaaatgtaattattaggaggaagatatgaacattgctatatacagcagaaaatcagtttttaaagaagccggagattctgtacaa

SEQ ID NO: 1955 - DNA, 260 bp, Artificial Sequence
  Description of Artificial Sequence: Synthetic polynucleotide
aattttagaacaaaaaggtaaaagtgtatattggctaaaaaatcaaacaaatataagtcattctacaatttataaaatggttaataatgaaactaaaatgatttcatttgaaaatcttcataaaatttgtaaagctttgaaatgtacacctaatgatgtatttgtatttaatgatatagaaaaggagattaacattaaaaatgaaagtagcaatttatagtcgtaaatcaatgtttacgggtaaaggtgactctgtagaa

SEQ ID NO: 1956 - DNA, 260 bp, Artificial Sequence
  Description of Artificial Sequence: Synthetic polynucleotide
tagcttcttataatgcctacttaatgcatgttgatatctgttattcctacactattagcactagaaaagatagctttaaaagtgatgtataaataataactattttagtgtgctacaaatggtttacatgtagtagcacacttctggaaaacatgttatacaagtaattatgaaaggttaatggtaaaaatactaaatggatggcattcaatatgagaacagtaggttatgcgcgtgtcagtactgaggagcaaggaaga

SEQ ID NO: 1957 - DNA, 260 bp, Artificial Sequence
  Description of Artificial Sequence: Synthetic polynucleotide
gccattttccccctggcgcaggaggtctctgcggcgggagggcatgatgcgggagtggcgggtgtgccgggtgttccagccccatccggacggccagagataccgggaccgagcctatcagcagctcctatcctggaacgaggcggagccgctgtgcgccgccccggccggtcccgagcctcccaaggaggaggtcagccatgagggtcgctctttatgcgcgggtgtccactcaacgtcaggcccaggccgacggcgtt

SEQ ID NO: 1958 - DNA, 260 bp, Artificial Sequence
  Description of Artificial Sequence: Synthetic polynucleotide
ttgatgataacaaagataaaaactcaaaaaactaaaaatgcacccattccagtaagtgcatttttaatgaactaaaaacatataacgttgaaaccgcaacggcttcttttaaacatattataccacaattatattaaatttaaacttatttaaatttatttttataaattatagcatttctatagatgaggtgtatttttatgatagcagctatatactcaagaaaatcaaaattcaccggtaaaggtgatagcatagag

SEQ ID NO: 1959 - DNA, 260 bp, Artificial Sequence
  Description of Artificial Sequence: Synthetic polynucleotide
cttgtcctgtataggaaaaggcactaaaaaactaaaaaaatatcggttttacgatttaaagtgttgacaaatcgttcgagatgtgttatactattattatagaacgcatcttgacaattgaatacccaatgttggacaagcacaacgatttatctaccgatatttagaacaacatgatctgaaatcggaggtaatcgtaaatgaacacagtttatacattatacagagtatccaccaagcagcaggtcgataagaccaag

SEQ ID NO: 1960 - DNA, 260 bp, Artificial Sequence
  Description of Artificial Sequence: Synthetic polynucleotide
ataatacaaaattttatgtgatttcaaaatttataggagctgtaacacttcaacatcttataaagagattgataaaaaatgaggtaggacaggtcgttaaatgacactaaaacagtcaaataaatagctgaaacccctatgagggcgtggtataatggaatggatatgagttgtttgtttgctgtggaaaggagcttacattgttaaaacagcaagcaaataataaagaaaaagttgcattatactctcgcctttcacga

SEQ ID NO: 1961 - DNA, 260 bp, Artificial Sequence
  Description of Artificial Sequence: Synthetic polynucleotide
taaagaaataagaagagtaattgaaatgagagaaaccactcttacagagtttgatgataatatatttgaaaatttaatagaaaagatagtagctttaacaccaacacatttagaatttcatcttaagaatggaatgaaggttgaagaagaatttattaaaaagagaggagtcaacggacttcagtaaaggagagatttttatggctagggtttcagtaataccagcaaggcaagtggctgttataaatggagttcagagg

SEQ ID NO: 1962 - DNA, 260 bp, Artificial Sequence
  Description of Artificial Sequence: Synthetic polynucleotide
tcttgcagaggaaaaaatcggctgcattgagtacaacgtgaaaaccgagcagaccgcgcatatagaggacgctatcaagaattgtgtggagctgccggagtttctaatacaagcggtcaggcacatctatgtcacgcccgacagagtgcgtgttaagttcatcaacggaaagacggtcaaaagtgaaaggagcaccaaccatgagtaatataaagacagcggcaaacgtgacacttatccctgcaaaggagcaggcaaac

SEQ ID NO: 1963 - DNA, 260 bp, Artificial Sequence
  Description of Artificial Sequence: Synthetic polynucleotide
gacacaagaaaacccaacccctattgttaatttgttattacagagccacttttggattgaccaaaggtggtttcttatttaaaatgtgatatacaagctttgcaattctgaaaatacagtgaatgaaaatccgcttgtttaatttgttaatacaatgggtatataaaatgtgttcaaattaactattaagaggtgaattcatgataggaggaatttatgccaggagttctttaggacaaaccaaacagggagatacagtt

SEQ ID NO: 1964 - DNA, 260 bp, Artificial Sequence
  Description of Artificial Sequence: Synthetic polynucleotide
aggtttactaatgaagaaatatattaagactactataagcagggataaattatatgatagaaactacagtagggacagtattgaagatgtaataatagatgaaaaagttaatagtagaataagatatgattctttagttaaggtattaacctctaagtatttagattctcaagaaaatggagtaaaaatatgaggagtgaatgctggtgataaaatctaaggttgttgaaattataagagcttgtgcatatattaggtat

SEQ ID NO: 1965 - DNA, 260 bp, Artificial Sequence
  Description of Artificial Sequence: Synthetic polynucleotide
gaatttgatgaggtgactttcaaccgccaaatagaggagattcagattcctgatgcgaacctgcttttatttgttttcaacgatgggcgcacagatctaagagaatggcagagcaaatcacgtagtgaaagttggaatgaggaagcaagggaaaaggccagaatgcgccagattgaatacttagaagggaggaagggagaatgcgtacggcacgtgcagtaagaatgatacctgcaacggcaaaacttcatgagcctgtt

SEQ ID NO: 1966 - DNA, 260 bp, Artificial Sequence
  Description of Artificial Sequence: Synthetic polynucleotide
ccaaaataatgaggatacattcaaatcaaaggtaaccaagataatcgttcaagaaaataggatgttagaatttcatatgaaagacgggaagatattaaactaccgatggaaacataagtctagaagtaagagttggacacctgaaatgaaagaacaagcacgattaagagcactagaacagcatcatggaggtggagaaaatgcctaaagtcacagtcataccatcaacaattaatcctattacacaaatgcctatccat

SEQ ID NO: 1967 - DNA, 260 bp, Artificial Sequence
  Description of Artificial Sequence: Synthetic polynucleotide
gggcgcgttgcgccgcgcctgctcgcggacctcgcccccgactacgcgacccgcgtcaccgtcgccgacgagaagaccggtcacggcatcacccgccacctccgccccacaacgagggccggccgagcccgcgccgccgaggactacccgttcatcgacctctccacagagggcaccggccgccagcccggtggcctgatgtggacactgagcgtagacatggaccacgacaactcgctgctgcggctattcgcggccga

SEQ ID NO: 1968 - DNA, 260 bp, Artificial Sequence
  Description of Artificial Sequence: Synthetic polynucleotide
ggcaacccctgtagggggcacaacctacgcgaaacactcctcgaacaagcctgcgcagacatgctcggcacccaaagtttcgaccccgtccaggttggcgagcagatcgtgatgattgaagccttcccgcaccagctcacattccacctcgcggatggaactatgacgccggtgggcttaaccagtgaggggaggttggcatgagtcgcacggtcactgcgatacccgcaacaaagaaacccggaactgtcacaaccccg

SEQ ID NO: 1969 - DNA, 260 bp, Artificial Sequence
  Description of Artificial Sequence: Synthetic polynucleotide
cggccatcacgtctgcataggcctggcgcccggccaacgcccctttccaagccggtaacttcttgccctttttcggcaacatctcccgttcctttcgcagctacactgctgatgagaacgtagaggcgagcagtcgtgggtttcgtgcggcagcggatggtcgccctggctgctgcagcaaacccatggagaggcgagccttggaggactggcgcactcaagacggcaccgaccatgacccggcatcgccgatcgtgcgc

SEQ ID NO: 1970 - DNA, 260 bp, Artificial Sequence
  Description of Artificial Sequence: Synthetic polynucleotide
cggccatcacgtccgcataggcctggcgcccagttaatgcccccttccaagccggtaacttcttgccctttttcggcaacatctcccgttcctttcgcagctacactgctgatgagaacgtagaggcgagcagtcgtgggtttcgtgctgcagcggatggtcgccctggctgctgcagcaagcccatggagaggcgagccttggaggactggcgcacccgagacggcaccgaccatgaaccggcatcgccgtgcgtgcgt

SEQ ID NO: 1971 - DNA, 260 bp, Artificial Sequence
  Description of Artificial Sequence: Synthetic polynucleotide
gaattaagtgatgtaaagcaattacgtgaaaagataagtaattaccaatcctctatctcattgtcctatgatgatataaaggagaatcgacagttaggttccttttttcaagatttaatacaacaagttaaaaccgacggaaagaactgcgaaattgtttttaaacacccattcttacgtactcaagaggtgttaacatcatgaagctttctcatatattacaaccaaatatgaaggctgctttttatggccgtcattct

SEQ ID NO: 1972 - DNA, 260 bp, Artificial Sequence
  Description of Artificial Sequence: Synthetic polynucleotide
attaaaaaaggttcctgatgtagtaaagaatttggaaggtaatatccataaacaattaatgttagattccttatcagattataagagtatggagttatttcaagatttgatttttactgtaattgtagatagacacggatatgaaattatttttaaacatccatttttacattatccagaggtgcatacatgtgaagacaattcgtgatgttttagaaaaaggaaaaaaaggagccttttatgcgagggtttcgtctgat

SEQ ID NO: 1973 - DNA, 260 bp, Artificial Sequence
  Description of Artificial Sequence: Synthetic polynucleotide
cctatcgatcgtcccgtggggccgcattgcggcggaacgggggcgccggcgctcacaaagtgagtcagcgtttaccgacagttgaaaggcttggtttccaaacagaaaagccgggcattcgacataaactggaggggtgttttgaaccaaaccacaggccgatgatcgttagcatgtcccgaatggcaggagcgcaagcgatggacgaggttgcaacgaccctaaaagctccttctggtaggcgcgtagtgcgtgcggcc

SEQ ID NO: 1974 - DNA, 260 bp, Artificial Sequence
  Description of Artificial Sequence: Synthetic polynucleotide
tagcgtcttcgcagctgattgcaaacagcctactcgatcgacgcgccatagcttcgctgctaccttggcagggcgaacacgaccgccgagcgccgacgcacgacctttccatcaggcccgcatcgaccgacggcgtcgcctgcgccaccggtgccttgccggtgaggcccgttggcccgttgacctggtggaggccgtacatgcaatcggacgtcccacgaaccgaagggcaggaggtgcccatccgcatgcgcgcggcc

SEQ ID NO: 1975 - DNA, 260 bp, Artificial Sequence
  Description of Artificial Sequence: Synthetic polynucleotide
atcgttcacctcacggtgctgaaatccacggaggggattcgcgcggaaagtttgtaaatagatgactcgtgccgcctaacgttacgcgctgctactctggttccgtcgcgaagcgctccgctccgtagggcgtcgattggcggttcgctcggacgagttctacggtacgcatgaagcgggtcatcggattggtggcaaaaatggcaggcgataccgaaccaacggtgtgcgaaggcggctcccatacgagagctgccgag

SEQ ID NO: 1976 - DNA, 260 bp, Artificial Sequence
  Description of Artificial Sequence: Synthetic polynucleotide
tgataaagagatatttgataaagctgaagaagttagagataaacgtgcaaaggatttaggacgagtggtagagcttgccgctttcacctctccccctcccaaagaacgattcaaaatgaaaaaggcagataataagatgccagtggatccttttgaacgagcagaatacttatacagtctgatagaaagcgaggaataaagtgacagagaaaaatataatggttattcctgctcgtaaaagagtaggaagtacagccgca

SEQ ID NO: 1977 - DNA, 260 bp, Artificial Sequence
  Description of Artificial Sequence: Synthetic polynucleotide
ttgaaagccatggtttccaaagcgcaaaggaaacgggcaaacccgctgatctcaacggccgataaagttgcgcacggatatatatttatatctggatgcggccgacggctcgcattcgaagcaaactcgacatgttttcctaaccaaatcgcaggcggtacaggcccctattatcaggtctgagtaccatggcccgcgcgatggacaaagcaaccacaccccccgagtttgaaaggcgaagggctcgcgctgctcaatac

SEQ ID NO: 1978 - DNA, 260 bp, Artificial Sequence
  Description of Artificial Sequence: Synthetic polynucleotide
ctcttcatcatcggcttcaatcgtcatgtcagaaacccggttataataccgggcgcccgctttcgtgaaccggctttcttaacgcgtgtgccaagataaaccccgtccttgcctgtaaggcactccttaacgataaaaatgcccggccagtaaaacggatggtgtgcccgccttcacataacctgagcgacacaggtggcatgctgtcgcgatatgaaggagggcatcatgataaagaagccatagcctatgtgagattc

SEQ ID NO: 1979 - DNA, 260 bp, Artificial Sequence
  Description of Artificial Sequence: Synthetic polynucleotide
agttgaaagccatggtttccaaagcgcaaaggagactggcatacccgctgatctcaacggccgatatagttgcgcacggatatatatatatctggatgcggccgacggctcgcattcgaagcaaactcgacatgttttcctaaccaaatcgcaggctgtacaggcccctattatcaggtctgagtaccatggcccgcgcgatggacagagcaaccacaccccccgaatttgaaaggcgaagggctcgcgctgctcaatac

SEQ ID NO: 1980 - DNA, 260 bp, Artificial Sequence
  Description of Artificial Sequence: Synthetic polynucleotide
tgccctcgccgaagtcgcttcgcagtgccgtcgctatggcagaagcaaaggccgcagcacctaagcgcccttcggttgaagaaggaaatccttttccgtttttggactgaatatttcggcccttgttcgtaggcgacatttcgtttcccctcgaattaatatcagaactcgggaaatgcctcaaaatagctgcgagatagatgaccggagctggcgatcagacacacaagactgaaaatgtgcgtgcggcacagtatgtc

SEQ ID NO: 1981 - DNA, 260 bp, Artificial Sequence
  Description of Artificial Sequence: Synthetic polynucleotide
taaagctgaagaagttagagataaacgtgcaaaggatttaggacgagtggtagagcttgccgctttcacctctccccctcccaaagaacgattcaaaatgaaaaaggcagataataagatgccagtggatccttttgaacgagcagaatacttatacagtctgatagaaagcgaggaataaagtgacagagaaaaatataatggttattcctgctcgtaaaagagtaggaagtacagccgcaaaagaaaagataaagaaa

SEQ ID NO: 1982 - DNA, 260 bp, Artificial Sequence
  Description of Artificial Sequence: Synthetic polynucleotide
tggcgggctccgaatttcagaggcctaagtttcgcttaaggggcgcctcgcacgatcaactcacagtcccggcgctggtagaggatgcttcggcagccagcccttgacgggtaggttcctcgatgccggtgactgtccaattctggccttcgcattggaaaaggcgcaccatcttcctaccgacacgctgggagcgcgagatggtcaagtcactcaagcctcagctcgacccggaaagggtcatacgagcagctgagtac

SEQ ID NO: 1983 - DNA, 260 bp, Artificial Sequence
  Description of Artificial Sequence: Synthetic polynucleotide
tttttgttcctctttttccattaatgcaagtggtgaatgaataatgacttttgtattaccaaattgaaattctttcatcatatccccccttgcattatatgtatgcaagacaggaaaaaagacgaactatcattttcataggacaagctagccatacatatctataacaataataatagacaagttggtaggtgaaactaatgtaccatccacaagaacttgatgtattcatctatttacgtaaaagtcgaaaagacctt

SEQ ID NO: 1984 - DNA, 260 bp, Artificial Sequence
  Description of Artificial Sequence: Synthetic polynucleotide
caccggcccgatgttgaccgccaccgacgtgatcatcgccggtttccatgagccggtgtttgcgccgcaggataaagcgtccaatactgaagcgatgatcgccgcaatggcgcagggggacgtgcatatcatcagccaccccggcaacccgaaaagaatttctgcgtattaaagtaactgattgattcttggagtgtttgatgaaattgtacagctatcagcggtggtcaagtgcagtacaggaggctggtactactaag

SEQ ID NO: 1985 - DNA, 260 bp, Artificial Sequence
  Description of Artificial Sequence: Synthetic polynucleotide
gcatcggacggcgaggagcatgaaagaaacgagtgcatttttatccagttgcagaatgggctgacatactgcactgacgaagattaaacggaattggtacggaacaggcgaattgcttgttccgtattcaaaaagcaacaggtcatctaaaccgtaaatatgtatcaaaatctgaacagtaaaaacaggagctgatgtttatgaagaaaatgacagtgatccctgccgtgtcgcagatcaggcagggacgtatcagagtg

SEQ ID NO: 1986 - DNA, 260 bp, Artificial Sequence
  Description of Artificial Sequence: Synthetic polynucleotide
tagcacgccctggcgctcctctcctccaagctgaacgtcagttacaaaaacgcctcggatcagagcgacccgtacgcggagcttgcattattcgcagcatcagctatcacactagcttgatcgggaggtgtggtatgcgacccgcgacccatatgcgcccccgaccggacacatcgtcgactgcggttcagtacgtgcgtatgtccacggacctgcaacgcgactcgcccaccaaccaaaaggaggtacttgcgcggtac

SEQ ID NO: 1987 - DNA, 260 bp, Artificial Sequence
  Description of Artificial Sequence: Synthetic polynucleotide
ggagataaaaaaatgaaaataattgcaggctatgccagagtttcttctcgtgaacaagctgttgattctcatgctttgaaacaacagacaacaagactaaaatccgccggagcaaccgagatttatcaagttattcaatccgttagtaaggacgatagaccacgttttaaaaatagacattatttgaaaaaactgagattatgactgagaaaacaaaaataattgtaggctatgccagagtttcttctcgtgaacaagct

SEQ ID NO: 1988 - DNA, 260 bp, Artificial Sequence
  Description of Artificial Sequence: Synthetic polynucleotide
atttaatggaacaaacaatatgtcaatacatggaattaaatatacctttaactaaaaatgattatatcttacttgaaaatgctatgttaaaagccttaaaaaatataaaaataagcaaaaatatacgcctaaaaatataggcattaatttttcaatttaaaacgaacatatgtacgcaaaaaaaggaagtgagtaaataagtgaaagccgcaatatatgcaagatattcttctgataatcaaagagaagaaagtattgaa

SEQ ID NO: 1989 - DNA, 260 bp, Artificial Sequence
  Description of Artificial Sequence: Synthetic polynucleotide
aatgccagtagaagctgaatatctcagtgtcaaagatcctctgctcgctccgaacatgggtgtgttgtcagcccgctttgcaatcatggcatatgcatcttttgacgcctgaaggctcgcagtaaagttggcgtgatttctcttaataactgctggttttatgccagcattatcgctcatgttctttcggagcatcagcaatgaaaaaagccatcgcataccttcgcttttccacttcctcgcagcagtacggagactca

SEQ ID NO: 1990 - DNA, 260 bp, Artificial Sequence
  Description of Artificial Sequence: Synthetic polynucleotide
tcgttttatgctttttgttaatgtctttagtttttattcattcttttgatctttcaagaccatggtgtaagaaaattgcaatacgattattgttgtatattcaagataatgtgaccttaattgtctttttaaataaaaattaaacaaaaatcatatctcaccactaaggtttataaaagcatactttagcaggtgtcaccatgaaaaaagccatagcatatatgcgattttcatcaccaggtcagatgtctggtgattca

SEQ ID NO: 1991 - DNA, 260 bp, Artificial Sequence
  Description of Artificial Sequence: Synthetic polynucleotide
aatttatgaatagtttataggttttattaattaaagtttactaatttttttaaatttattaatagttaaaaaaaaattattatttttattttcacaaaaaaaatgtgcaggatttattcaattaaaccttgcacattttttaattaattgtttataataaaactaattaattaagtttaaaaagcaacacataatttaatatgcaccaatataatatagtaggctatgcacgggtgtctagtcgtgaacaggcagaaaat

SEQ ID NO: 1992 - DNA, 260 bp, Artificial Sequence
  Description of Artificial Sequence: Synthetic polynucleotide
gcagcgaaaatgctgacgatgataataacgccgataacgatacggcttcatgagcgcctaatattatgcggagcaggtcaagcgcctgttccgtatataaaaatatgaaaggtcaactgttttgtagcaaggctgtcaaccgtattgtaaggagcttgtcaactgttccgttggaatgaataagaagggagaaatttggtatgaacaacatgatagtagtacctgcggctgcaaaggttcagcgagggctgacaagggtg

SEQ ID NO: 1993 - DNA, 260 bp, Artificial Sequence
  Description of Artificial Sequence: Synthetic polynucleotide
tagtggctttggggagcctcggatgttcgcggcgacaatcgcaggccgaagatcggaatatcatagtgctccagcggaaatgtatgtgcatcggcctgcaacactgggccagtttcaggggtgatcggcgtccaataaccagccacccctgatctggcagactaccaccctgggtttggacgacagggtggcggacagggatgttgacggtggagacgatcgcacggatacgacgcgagcacgcgaaggggaaaagcatc

SEQ ID NO: 1994 - DNA, 260 bp, Artificial Sequence
  Description of Artificial Sequence: Synthetic polynucleotide
cacgccggagcaggaagcggccaaacgccgggaactggagcagcagctttatgaggtgttccgcaaatacgccgataagcggcagaaagaggaagccggggcataaggtttcccgaagccatcgttgatttgcggggctgctggcggtataataaaactgtcagcagctccgtttcttttttaagaaaaggagcgacaaaatgaataacaggatagacgcgatctatgcaaggcaatcggtagacaaaaaggacagcatt

SEQ ID NO: 1995 - DNA, 96 bp, Artificial Sequence
  Description of Artificial Sequence: Synthetic oligonucleotide
taatcgagttgcgatgctaactggcatactagcgcagtgagacttccagcgcagccactaccctccgatctcatcgacgcgctgtacgcgctgccg

SEQ ID NO: 1996 - DNA, 260 bp, Artificial Sequence
  Description of Artificial Sequence: Synthetic polynucleotide
ccccccgtgcaatttgttttgaaaggtgatgattttaatgaccgtgcaaaagaagcttcaacttagatcgatttcgtatattcatgatcctgaagctgcacaaaaatggtttcaattatatgtggaacttttagtagaaataatgaaacaaaatgattctatggacaaggatgacgtgcatacattgtaagcacaacaagatggaagggctggttgtattgaagaaaacagtcgcatattaccgtagttcatctaaaaaa

SEQ ID NO: 1997 - DNA, 260 bp, Artificial Sequence
  Description of Artificial Sequence: Synthetic polynucleotide
ctgcgtcctccttcgataatactctgggaaggacatgaaaagcggcagttcgtatttgcgcccaatctgcggtagagggccatcagctcgaagcagcccacatgatttcttgggaggcgggcgtggctcggggaaaagcaccattatccgaaggagaaaccgagccgtccgcgcagctgctggctgcggagtacgtccggatgtcgaccgagcatcaacagtattcaacccagaaccaggcgcagacgatccgcgaatac

SEQ ID NO: 1998 - DNA, 260 bp, Artificial Sequence
  Description of Artificial Sequence: Synthetic polynucleotide
tttaggcatgcaatcacgcgaagaatgatgcgaagtgatcgctcccccttgttaatatccaatttagctcaaaatttaggacatgagaaagaccagggcgttatcatttcatgttatggtactagccctgaacatgacagggcggggattttaaaggcatttgagctggagtagtagcaattttaaagaggtaatgaattatgaaagccgtaatattcgccagagtatcatcaagagatcaagaagatggtcattcattg

SEQ ID NO: 1999 - DNA, 260 bp, Artificial Sequence
  Description of Artificial Sequence: Synthetic polynucleotide
agcgccctccggttgaagaaggaaatccttgtccttttttggactgaatatttcggcccttgttcgtaggcgacatttcgtttcccctcgaattaatatcagaactcgggaaatgcctcaaaatagctgcgaaatagatgaccggagctggcgatcagacacacaagactgaaaatgtgcgtgcggcacagtatgtccgcatgtccactgagcatcagaagtattctaccgaaaaccaagccatcgagatcgctaagtac

SEQ ID NO: 2000 - DNA, 260 bp, Artificial Sequence
  Description of Artificial Sequence: Synthetic polynucleotide
ctttttcggcaacatcttccgctccttcatgcgctaggattgcgatgcggatgtctgcaaaaatggatgtgctcggcgccgcgccagcctcaggatcaagcgcctttgatcaacgacaggaggggcaaaaagtggatcgggagacctttaacggcatgtcatcggagccgcagccaattcgggctgccgaatatgtccgtatgtcgaccgatcatcagcgatattctaccgaaaaccagtcggaggcaattcgggactat

SEQ ID NO: 2001 - DNA, 260 bp, Artificial Sequence
  Description of Artificial Sequence: Synthetic polynucleotide
ctttttcggcaacatcttccgctccttgatgcgctagaattgcgatgcggatgcctgcagaaatggatgtgctcggcgccgcgacagcctcaggatcagacgcctctgatcaataacaggaggggcaaccagtggatcgggagacctttaacggcaggtcatcggcgtcgcagccagtgcgggctgccgaatatgtgcgtatgtcgaccgatcatcagcgatattctaccgaaaaccaatcggaggcaattcgagactat

SEQ ID NO: 2002 - DNA, 260 bp, Artificial Sequence
  Description of Artificial Sequence: Synthetic polynucleotide
gcaagatgcaggccagcttcgcgaagggccagagcctgggcaacgcgcggaagactgcggccaagccggcggccaagcggaccaccaagaagtaagccgtagcgcttcgggaaggccctccaagtttggggggcttttttacgggttgcccccgcaacatcagtcctggcccgcacgtctgcgggccacaataggtcatcatgccaaacgcttccttgcgcgctgcgacctaccgccgagtctcgaccgaggagcaggtc

SEQ ID NO: 2003 - DNA, 260 bp, Artificial Sequence
  Description of Artificial Sequence: Synthetic polynucleotide
gagggtgttgccgtcctccggcccttgagtcgcttgtgattgcaaagagaggacttgttcgaactgccggcgacttgctgctaccttccaacacaccaaaagctgattcaaatcacctggcagccatgtcgatcgatcacggactcgaacgctgcggtggcgaggccgccgcgccattccgggcagccgaatacgttcggatgtcgaccgagcatcagcagtattcaacgctcaatcagtccgacaaaatccgcgaatac

SEQ ID NO: 2004 - DNA, 260 bp, Artificial Sequence
  Description of Artificial Sequence: Synthetic polynucleotide
atgatctgcccttcttcggcaacatgcttcgtctccatgacgatacactgagagaagcagagggtttccggcgtaggatcgtccgtacaacggtcgattgcttggtgtgccggtaagacgggtggtgaccgccaatgacagcgccgcgcaatgagatctcttccggctttcccgaggtgcgtgccgcgcagtacgtgcggatgtcgaccgagcatcagcgctattcgacggagaaccaggcggatgccatccgtgactac

SEQ ID NO: 2005 - DNA, 260 bp, Artificial Sequence
  Description of Artificial Sequence: Synthetic polynucleotide
actgcgcagcgaacgtcatgtgcaagacgcggccgaggtcaggcgatatcggcggcatgcggttgggactggaactgcatgagccggctggcgcttgttcgccgtcccgcggttgggggggccaagctctctgcgctcaggttgcgcagtttgtgaacgagcagtagaggcgaaccgagggttcgcaaggggaaaaagctatgcgcgccgcgggatacgttcgcatgtcatctgaccgacaagagctttccattggcacg

SEQ ID NO: 2006 - DNA, 260 bp, Artificial Sequence
  Description of Artificial Sequence: Synthetic polynucleotide
aaaaagacgggcgaatctttactgccacactcgaagataaatgggtttttcgcaaggccgcccaccttaaagagttaaaagatgccgagtgggggaaatcgccaatttttctaagaataaacgggaaagaaattgacggacaagtaactcaggccatgattgttgatgtaggtgaagacaaagagtaagaccaaaaacccatgatcgcagcagtctatatccgaaaatcccgcgaagataaaaataaaccctcccaccgg

SEQ ID NO: 2007 - DNA, 260 bp, Artificial Sequence
  Description of Artificial Sequence: Synthetic polynucleotide
gacagtatctgaacgagtctcaccgtgagccggtggagatcacgcgacatggacggcgcgagtttgtactgatgtcggccgcccaatatgacgagctactgtcagccgcgcagcgcagcggcaaggccgctgaagccgccaccgaacccgaacgtcattaagatccctcccccgacacggagcctgaaaggactgccgatatgacccgcgttgcgctttatgcccgatattcttccgacaatcagcgcgaagcgtcgatc

SEQ ID NO: 2008 - DNA, 260 bp, Artificial Sequence
  Description of Artificial Sequence: Synthetic polynucleotide
attgatttaactcactcaacttatttccaggttagccaactgtcttgaagaaagagatttctcaataacctttttgttccactgaattttcttgaggagctaaacgtcaaactttgttagcctttgtcgaacatttagttcaatcaatgtttgacatacaattagttaactaattaatcgattacggagagaatataaggatgaaactgaaacctattattggttatgctcgtgtctcaacggaagaacaagccaacacc

SEQ ID NO: 2009 - DNA, 260 bp, Artificial Sequence
  Description of Artificial Sequence: Synthetic polynucleotide
aggaatatgtaaaatgaataagcaaaagaaaattacaattacatcagtaagctatgttcatgatccagaatcagctcgaaagtggtttgaagcatatatcaagattgttgaaaaagaattagttaaagcaattaataaggactagctgctatttttgatacatacagtgtaaatagaacatcatgagaggaggtcctgaattgaagaccgttgcatattatagaagttcaattgattctcaggaaaactcaatcgaaatg

SEQ ID NO: 2010 - DNA, 260 bp, Artificial Sequence
  Description of Artificial Sequence: Synthetic polynucleotide
aagcagttcgaccggcccgctgagcactcggcggttcctggacctcatggccgccgcgaacaggcgcatctgaaccgccggggcgaggagccgcctgtcttcgccgcgctcaccattcgtcgaccccccagggtggaccggtcgcgacggcggcgggctcaacccacagctgcaatctcaaatgtcgctaaactaccctcatggcgaaagcaaaaactcctggtcagcgggtgggagtggggtcggcggcgatttacgcg

SEQ ID NO: 2011 - DNA, 260 bp, Artificial Sequence
  Description of Artificial Sequence: Synthetic polynucleotide
aatgagttacattgtaattcactcatgcttatcaagcaaggagcaacagtcaacttggagtataccccatcctgacgtcaggcacaggcccgaaaagcgtcagattagggtccttttcggaattgattgacactctcactccggggtcttagactctaacttgacacttttgccttccccctcaaaaaacaggagttcccttgagcgaccagcgcatcggctatgtccgcgtctcaagcgtcgaccagaacacggaccgc

SEQ ID NO: 2012 - DNA, 260 bp, Artificial Sequence
  Description of Artificial Sequence: Synthetic polynucleotide
gcgcacatggtccggcgcatggatagccctgtgctgcgcatgcacgtgtcgttcgaagcgacaagaaccggcccccaacttctgatcgaggcctacgcccatcttgtgccgacgatacggcgcacgaagcaacggccggtgcgtcgagcgaacccctcatcgaaggtgacgaaagcgatggcgagatcgggaggtgagcaatgaccgagacacgatgcgcgctctatgcgagggtgtcgagtgaggcgcagacgcgcgac

SEQ ID NO: 2013 - DNA, 113 bp, Artificial Sequence
  Description of Artificial Sequence: Synthetic polynucleotide
agctgacctgggctacttgtcaagggtgacatgtacggttcacactatcggacgtgacttcgacgatcgttcgtgtagtgatctactgccgcatctccaaggaccggatcggc

SEQ ID NO: 2014 - DNA, 260 bp, Artificial Sequence
  Description of Artificial Sequence: Synthetic polynucleotide
caactcaatattaatatggaagatttatacgaattcattcagtcggaaaaacagtgagtttttctcactgcacctgaaagtcaactacttgattgacctcgattcataatgcgccttattgaaacttatattttcacatagtattcgtctaataaattaaaaatatacataaaatattgattaagaaaggggtttagctaatgaaatgtgtcatttatagacgtgtatcaactgacatgcaagttgaagaggggatttca

SEQ ID NO: 2015 - DNA, 260 bp, Artificial Sequence
  Description of Artificial Sequence: Synthetic polynucleotide
ttctcgaaaagaaaaaatgaactcaagaatatgccttggccttttacattcccaatcgagagtgtaaacgaagtggttcattaatgattccatacaatgtacacaataaaatgacatatgttatctcttataaagcgctcggcatgagcgctctatttttgttagcacggaatttgtttttttcaaaggagggcaaccaaatgaaagtcgccatttacgccagagtaagtacagacgagcaagcgaaagaaggcttttct

SEQ ID NO: 2016 - DNA, 260 bp, Artificial Sequence
  Description of Artificial Sequence: Synthetic polynucleotide
gcatcggtcagggccagcgactccccgtcgagcacgacggaccggcacgggagttcccgcgccagcgcgacgatctcgggcacggcgtcggtgatgtcgcggagcgtgcgggtgtagacgcgcacctcgtcgccgagccggtggacctggatccgggcgccagccaatagttggtcatgactcatgtagtatttggcgccatgaccagcgccaacgccatcatctacgcccgcatctcgaaggaccgcacaggcgcgggg

SEQ ID NO: 2017 - DNA, 260 bp, Artificial Sequence
  Description of Artificial Sequence: Synthetic polynucleotide
gccggcgctcgtcacgatgctgcgcagcagccggggacggcgaaatcggggacctgttcgtcccgagccaaaccgccaacgggattggcgatgaggacaacggtgacaacgtttgaagcgccacatcgggggttgatgccgttggcgaggtaagaccgggaacggcgctaccgtggcaaggtcgcgcctagtgtctgcatatggaagctgcggtgtacctgcgtcagtccgtcgataagtacggtgacgaacttgcgatc

SEQ ID NO: 2018 - DNA, 260 bp, Artificial Sequence
  Description of Artificial Sequence: Synthetic polynucleotide
gggtgcagctctcacgagcaagcgctgagtcgagaaagactgaggggcgatccctgtcggttagtttgccgaatgaggctgccgctgccgggacggttccgagtggacggccgcacgagatcacgatgcttctggcgagccttgtgctctcgacccgtcatccgacagtcgccaggtgatggaggatatcgaacatgtccatgaacagcgaatctcatcaaaagatcacaagcgcacacctgtcgcgcatggcgtatctc

SEQ ID NO: 2019 - DNA, 260 bp, Artificial Sequence
  Description of Artificial Sequence: Synthetic polynucleotide
tgaagcgactttataacgatgtggaatacgaggtgattgtgcgatcagacggacagtttgaatttcaaaaacagctctataaaagcttatccaaaattgcgaaagagattaccggtacacattggtctggacctgcgttttttggtttgcgtaagcctaacaccccatcgaaaaagaaaaagtgagggaaagaaaaatagatgagtaaacatgttatacctaaacgtcgatgtgctgtctacacacgaaaatcccacgaa

SEQ ID NO: 2020 - DNA, 260 bp, Artificial Sequence
  Description of Artificial Sequence: Synthetic polynucleotide
cgtgaaaagaactataggatatcgatcgctatcgccaaggaaatgctctcgaaaaggattataaacgagagggaatacagcaaaattgataaaatgcttgttgctaaatataaccctgtatttggaggcttgtaagccttaataagcttgctatgtatcaaaatcagagttaacatggtgcttgaaaggaggagctttcaatgaccagaataataaggaagataacgcctaaggcgccaaaagcacccataaaaaaacgt

SEQ ID NO: 2021 - DNA, 260 bp, Artificial Sequence
  Description of Artificial Sequence: Synthetic polynucleotide
tttagagatgtattacttatccattgcacccattaaatcaatgtttgagggggggattttaagtaaatctgaataccttaaagcagaagcatttttagcagacaaatattgtatcaataaaggtaacattcatcgtcttaacaacttgactaaaccccctaaaagagtgatatatggtgtaaccaaagaggaggtaaaagatgaaagaaaagaagataaccaaaatcgaagcattatccaaattaccaaagaaaactaga

SEQ ID NO: 2022 - DNA, 260 bp, Artificial Sequence
  Description of Artificial Sequence: Synthetic polynucleotide
gttgttttaacagtcattccccgtttacatatttatgactttgcaacagaaatttacagtttcctcactgattgaggttttttacgctttcggatcatatacttcaacataagttattgatcttatcgatcaatttcgtttatcgttaaagtaagtattttcacttgattcactagcttgttgaatggaaattaaaagccatgactggaacagccgagttggttattttcgttaccgatgcaactggctttgcaatgcag

SEQ ID NO: 2023 - DNA, 260 bp, Artificial Sequence
  Description of Artificial Sequence: Synthetic polynucleotide
cagctcaaaccagatgcgtactgatgtagtggagtcggcgcgaacctggttgggagcatgttcggctcagatagtgattgtcggaaaacgatcatttgccgacaaccttgcgtgagcgggagaaaccccaagataagagtgtcgaaaactcgtgccgggaatcaacgtcggcaaacccgatttcagctattttcgacatcatgttgatcggctacgggcgggtgtcgaccgccgaccagaaccccgcccaccagatcgac

SEQ ID NO: 2024 - DNA, 260 bp, Artificial Sequence
  Description of Artificial Sequence: Synthetic polynucleotide
agaactcgccttcattactgacgctcacacgttgagcatgctggcaggtcgaggagtgctaacccccgcagagtatcggcgtgtctatcggttgttgttccaggcgttgagcccgatctatcaaccacagattgtgggcgaaacgactggataaacacctggtttagagcgtgtatagacctaacacgaaaggagaaaacgtggcacaagttagtgtggtgacaccagttcggccgccgaccccgaaactggtcaacgta

SEQ ID NO: 2025 - DNA, 260 bp, Artificial Sequence
  Description of Artificial Sequence: Synthetic polynucleotide
ttccaacgccggacccgctgattaagagtcagcgggtcccgtcgctgcgggggccgcgatcgtcggccgacgggtgtcgggggtgtcgggctgtcccgataacgaaggtttttgggacaccgccgtggtgttcggctgacctggacgtttcgtgtcccaaaaacgcgtgccgaaagttgtcggtgtcggctgatacaaccatgttcgtgccactgctgggatatgcgcgagtatcgacgagcgatcagagcctcaccggg

SEQ ID NO: 2026 - DNA, 260 bp, Artificial Sequence
  Description of Artificial Sequence: Synthetic polynucleotide
cttcgagtaacagtttcgggccggtaactggtcttcacgaagtgagatccctgaaaaggagtactttattagtttcattagggtataccctattgagacagtcatttttgtatcatttccactgcctcactaagtcctaaccgttagttttgatacactgtccgtaatagctattaaccctattgagacactaggttgatatgacccgctacggcaccctccttggactccacggccaacccaccgaccgcgtcatcatt

SEQ ID NO: 2027 - DNA, 260 bp, Artificial Sequence
  Description of Artificial Sequence: Synthetic polynucleotide
ttgaactgcaggaagttcacaccccaatcccaaatgagtacagcaggaggagcagtatgaagccaccacgccggcgatcagggaccgtgtccaccaggcgcgggtgaagaacgcgttggagcccgagtgggaagccaggttcgacggcaggagctacggcttccgccccggacgtggatgtcaggacgcaatggagacgatccacaatgtcaccgctaagcgcaacgcgcgacggctgtgggttctcgacgcggatctgg

SEQ ID NO: 2028 - DNA, 260 bp, Artificial Sequence
  Description of Artificial Sequence: Synthetic polynucleotide
accctggatcgataccggcggggccgcgacgccgacgcggccccgcccgggacggcctgatcccgcctcgggggcctctccagctcgagcggccgcacggcgtcggggttccgcaaccctcgacgccgtgcggttttctttttagccgtcgtccagttcgaggatcgttcgttctcggagtagtcgtggacgcgaccacggcggatacgaacgatcgaatcgcgaaccgagccgcgtagttcgaattcgaagcggctccc

SEQ ID NO: 2029 - DNA, 260 bp, Artificial Sequence
  Description of Artificial Sequence: Synthetic polynucleotide
cccgcctcagacccttatcggacgggctctcagtcgcaccatacaatctatggaaagtagcaaatctcaattatatttcgaccaagtctcaatgatttttctttcttctttagtcattccggtaagattattgagtggcatgaagtgtgtcagtactgcagctgtttttatggcctgacggttgcttacgatctcatccggcgtatccagcaaaacaccgttcggcggcgcatgtacgtccttgtaagagggattttgcg

SEQ ID NO: 2030 - DNA, 260 bp, Artificial Sequence
  Description of Artificial Sequence: Synthetic polynucleotide
gctctgggcgccacgcccggttcccaatcatcctcagcagcaaggaccacagcacaatgaagacggctcggacggcggggccacgcactgggcggtcgtcgcctcgctggtcgagacgtgcaagctgaacggggtcgagcctcaggcctatctgaccgacgtgatcgcccgcatcgtcgccggccatccgcagagtggcctcgacgatctgttgccctgggcctacgccccgcaacccctcaaggctgtggcttgaggac

SEQ ID NO: 2031 - DNA, 260 bp, Artificial Sequence
  Description of Artificial Sequence: Synthetic polynucleotide
aaaggtctatggatcaagaccatagatcaaaacccaaccctcttcgaacacatgctatgagccagggggcattatgaaagtcgatccaacagccctttgatgtcgaattcgagaacccgatcatacttccagcaccgctggcgcgtcacgcccacggcatccagggccgattttcccggcctgtaaccgtaggagtcgggaagaaagagggagtccaaatccggctcgatcatctgcttgaccaccatctgcgcgatccg

SEQ ID NO: 2032 - DNA, 260 bp, Artificial Sequence
  Description of Artificial Sequence: Synthetic polynucleotide
gtcgccgtgctcggcctgctcacgaggcgatctctcgaagctcgccggtcgcccatttgaggggcaggcggccgaggctccgatcaatccgtcttcgaccttggcgcgaggcgagcgaccatcggcgcggcaagcgcgtggtagagcccttcgcggcacacgagcttcgaggtcgcgtcggcgatcacggccgagaccatcagcggaatgatcatggcatggttctccgtcatctccgacacgatgacgaaggaggtgat

SEQ ID NO: 2033 - DNA, 260 bp, Artificial Sequence
  Description of Artificial Sequence: Synthetic polynucleotide
aaaggcttgcgtatcaaggctgtcaacgatcaacctgacctcttcgaacactcctcatgaaccaaagggtattgcgatgcacgatccaagaacttctccagatcaacatccaccaccactttgcgccccgaggacacataccgctgagccgccaaaacggcgtcctgcgcgcaacgtcccgggcgaaagccgtagctgtgttcactgaaagttggatcgaggagtggctgcaagacttgcagcagcgcttgttggatcaa

SEQ ID NO: 2034 - DNA, 260 bp, Artificial Sequence
  Description of Artificial Sequence: Synthetic polynucleotide
ataaacgaagccgtcattgttcaactcgaaaacttcaacttcaacgtgtgcttaaactagcgcttactagctgtgcgccgaactgcgaagcggaacaggacggagaaaggatttacatccgcaccatcgcgaagatcaaaccaggcgacgaaatcctgatcgattaccggcttgacgtggggacccggccaatcaaagcactgaaggcgacatatggatgccggtgtggcgccaagcgatgtcgactaacgatgttgcat

SEQ ID NO: 2035 - DNA, 260 bp, Artificial Sequence
  Description of Artificial Sequence: Synthetic polynucleotide
tggcaaggagaaacatcagtgcttgcccaatccaacgagagtgacgatgaacgaacttagcaacaaaagttgcaatgcgataggtttagcttggagaagcaaataatgaaacaacaatctaaatcaacagactcgaaacattcggctgaaaaagttgaggtttacagcggcagtctggctgggtcatctccaccacccaccgctttttgagtagaacaaagcccttggtttgttccgggcgtaatacgacctggacaatc

SEQ ID NO: 2036 - DNA, 260 bp, Artificial Sequence
  Description of Artificial Sequence: Synthetic polynucleotide
tggtacagccgccgactctgggcagatagcaccgacgaactgacgcatccacattcataggtgcagtgtgcttgacccatctcgaccacccagcgccgcggggtcaccgagaagcctttgacctgggtgttcctggggacgacgtccacgtcgatgccgagggcggcgccgtattcggtggcctggttcttgtagccggtgtcgacccaggccttggtgacggtgggggtggtcgaccgcgaggtgggtcaggagctgct

SEQ ID NO: 2037 - DNA, 260 bp, Artificial Sequence
  Description of Artificial Sequence: Synthetic polynucleotide
tatcgacaaatgcaaaccgagccaagaacatcaactggcgaggaaagaggtgtagtatgaacgccgatcgttggcgaccaagcatacgccactgccatcccagaagatcagtttgatgcggtcggtgcgcttggccctgaacacgtagatcgtgccggagaatggatcagttcccatctcagccttcaccagcgcagccaatccctctgcacccttgcggaagtcgaccggcttggtggcgatcatgactttaaccgcgc

SEQ ID NO: 2038 - DNA, 260 bp, Artificial Sequence
  Description of Artificial Sequence: Synthetic polynucleotide
tgggcgaacaaggggcggcttgccgaactgaccagaccgaggccgcgcccgggacggtagagtgagggcggcccggctcagggcgagccgggccgccccatcgcgctcttggagggcattatggctggaacatcgagctcgggtaccagcagatgaaggaggaactggggctggaccaccacgagggccgctcgtggcggggcttccaccatcacgcctgcctggtgatgttggccttcgggttcctcaccctggagcga

SEQ ID NO: 2039 - DNA, 260 bp, Artificial Sequence
  Description of Artificial Sequence: Synthetic polynucleotide
cgccaacaaacgcaaactgagccaagaacatcaactggcgaggaaagaggtgtagtatgaacgctgatcgttgtagaacaggcagaacccttgaccgtcccaccaaagaagcttgatccgatcaggccaatgaccgacattcagcgttggtgcatggatcctttgtcaacggtttggcgataggcaggcaggatcgaaatcagtttgatccgagtgccatgccgtacaaacacaacgccgatcgtcgtcatcacgtcgga

SEQ ID NO: 2040 - DNA, 260 bp, Artificial Sequence
  Description of Artificial Sequence: Synthetic polynucleotide
tatcgacaaatgcaaaccgagccaagaacatcaactggcgaggaaagaggtgtagtataaacgccgatcgttcgtgaacaggcaggcgccttggccgtcatgccaaattagttttaccagatcacctcgtcgacccctgaagcagaacagatgaccgcccagagggtcatgcttcaacacctcctgcacccgaagggccagcgaaggaaagccgcaccgcatgtctgtatgtcccgtcgccagccacaccttgacccccg

SEQ ID NO: 2041 - DNA, 260 bp, Artificial Sequence
  Description of Artificial Sequence: Synthetic polynucleotide
tatcgacaaatgcaaaccgagccaagaacatcaactggcgaggaaagaggtgtagtatgaacgccgatcgttggcgactaggcagacgccgctgccgtcccagaagatcagcttgatccggtcggttcgtttggcccggaatacgtagatcgtgcccgagaacgggtctgcacccatctccgccttcaccagtgccgccaatccttcagcacctttgcggaagtcgacaggcctggtggcgatcatcacctttaccacac

SEQ ID NO: 2042 - DNA, 260 bp, Artificial Sequence
  Description of Artificial Sequence: Synthetic polynucleotide
cgccaacaaacgcaaactgagccaagaacatcaactggcgaggaaagaggtgtagtatgaacgctgatcgttgtaggccatcaccagaccgctgccatcccagtagatcagcttcaaccggtcggccttgcgtgactggaatacgaagaccgtcccggtaaacgggtccttgtgcagctcgttcttgaccaatgccgccaacccatcatggcctttgcggaagtcgaccagcttggtcgccaccatgatccggacgcggt

SEQ ID NO: 2043 - DNA, 260 bp, Artificial Sequence
  Description of Artificial Sequence: Synthetic polynucleotide
atcgacattctgcgcgctcgcgctcaacgcaatagacgatcgaggaaacaggcatcatgaaatcattggtgaccctgtcgtcgccaccgcgatattggaccgcctgctgcaccattcgacagtgatcacaggcttcgcgaaaagcgccgttccggccttctgcagaaggccggaacggcgctcgagacaaacgaaacagcaagtcaatgaagggggtcagttcatcgtttcgcctacggggtcaaatcttcacttcgctt

SEQ ID NO: 2044 - DNA, 260 bp, Artificial Sequence
  Description of Artificial Sequence: Synthetic polynucleotide
atccggtatctgcagaatcgtttacaacgcatcagacgatcaaaaaaggtggcatcatgagatcttcgcgtccccaatcaggtcatgccatgcgtccacgggaacctggctcgtgacgatggtcgatgagcggccgtgacgatcgtcgaggatttccaggagatcgcgccgctcggacccggtgagcactgacaagccccaatcatcgaggatcagcacctgtacgcgaccgagggccttgagcaggcggccatagcgcc

SEQ ID NO: 2045 - DNA, 260 bp, Artificial Sequence
  Description of Artificial Sequence: Synthetic polynucleotide
atgagtcagcttcgcaaccgggtacgacgcaccaagcgttcgaagaaggaggcatcatgaagtcatcggctccccaatggctccatgccaggtgtccacggggagctgacttgtgacgatggtggatgcgcggccatggcggtcctcgaggatttcgagcagatcgcggcgttccgcggcggtgagcaccgatagtccccaatcatccaaaatcagaagctgagcgcggccgaggcttttgaggagccgggcgtaacgtc

SEQ ID NO: 2046 - DNA, 260 bp, Artificial Sequence
  Description of Artificial Sequence: Synthetic polynucleotide
ctcgtcgatcgcctcgccgcccataaggaaaatgccagacacgccaaaaccttcaactgaatccgaaagagagatgcagtatgaatgcagatcgttgtaggttagcaccattccggtgccatcccacaccaggatcttcaggcgatcgccgcgcttcgaccggaagatcaccgtcaccccggaatgcggatcgagcttcaattcggtctgcaccatcagagccagcgcctgatgcccacagcggaagtcaaccggccgcg

SEQ ID NO: 2047 - DNA, 260 bp, Artificial Sequence
  Description of Artificial Sequence: Synthetic polynucleotide
ctcgtcgatcgcctcgccgcccataaggaaaatgccagacacgccaaaaccttcaactgaatccgaaagagagatgcagtatgaatgcagatcgttgtaggttagcaccattccggtgccatcccacaccaggatcttcaggcgatcgccgcgcttcgaccggaagatcaccgtcaccccggaatgcggatcgagcttcaactcggtctgcaccatcagagccagcgcctgatgcccacagcggaagtcaaccggccgcg

SEQ ID NO: 2048 - DNA, 260 bp, Artificial Sequence
  Description of Artificial Sequence: Synthetic polynucleotide
ataaaggcgctcacagcgccaaattacagtatgaccccttccaggaaagcagcatcatgaaacgttcggcgagccgaccatcgccgacgccatcctcgatcgcatcatccataacgctcatcgcatcgccctcgaaggcgacagcatgcgacgacaaaaagcgccttcaggcttgacccaggatccaaatccggaaatcactcaaccctaacagcaaccaggcatccaatgcctaaaccagctgtcccggatttactgaa

SEQ ID NO: 2049 - DNA, 260 bp, Artificial Sequence
  Description of Artificial Sequence: Synthetic polynucleotide
ctcgatcagctcgatctcagaatcactgagcctcacgaggaggggcatcaacatgcgtaatcgagcagcaccgagagttgagcatgagatagcggcatgacgccttccttgatcggcggccaggtgaactgcccctcgattcttttgtagtaaaggacaaggccgcttccgtcccaggtcaggatcttcacgcgatctcggcgcttggaccggaagacataaagtccgccgtcgtacggattggccccaaacccctcgct

SEQ ID NO: 2050 - DNA, 260 bp, Artificial Sequence
  Description of Artificial Sequence: Synthetic polynucleotide
cgccccaagaacctcattgattatcaaagagatgagacgatgccgctgccaggattgtgaaaggagggatgcactatgtcacgcgatttggtgacatggtgaagtgcctgtggcatgacgggctcggcatgtcgctttacgccaagaggcttgaacggggccgtttcatctggcccagcccggccagcggagccgtggccatttccgcgtcccagttcgcgtatctgctcgacgccatcgactggcgcaatccgcagcag

SEQ ID NO: 2051 - DNA, 260 bp, Artificial Sequence
  Description of Artificial Sequence: Synthetic polynucleotide
cgccccaagaacctcattgattatcaaagagatgagacgatgctgttgccaggattgtgaaaggagagatgcactatgtcacgcgatttgcgcgccgcccccggaacagaaagcgcccagtcatccacgccgatgacgcgcggcggtttaacggtcggcaagggcaatgcccggatgacacgtagcagggtgtccctgctgactggcatcccaagcccgcgggcgagccgcgcccccgcagcgcccccgagagcaatccc

SEQ ID NO: 2052 - DNA, 260 bp, Artificial Sequence
  Description of Artificial Sequence: Synthetic polynucleotide
cgccccaagaacctcattgattatcaaagagatgagacgatgccgctgccaggattgtgaaaggagggatgcactatgtcacgcgatttggtcggcggccccggaacaggaagagatggccggagtagggatccttcttgagaacctcctggaccaacagggcgaggccgtcgaagcccttgcgcatgtcggtggcgcccatcgccagatagacccgcaccccggcggggaccgggatcatcggcgctccagaacggcga

SEQ ID NO: 2053 - DNA, 260 bp, Artificial Sequence
  Description of Artificial Sequence: Synthetic polynucleotide
cgccccaagaacctcattgattatcaaagagatgagacgatgccgctgccaggattgtgaaaggagggatgcactatgtcacgcgatttggtgacatggtgaagtgcctgtggcatgacgggctcggcatgtcgctgtacgccaagaggcttgaacggggccgtttcatctggcccagcccggccagcggagccgtggccatttccgcgtcccagttcgcgtatctgctcgacgccatcgactggcgcaatccgcagcag

SEQ ID NO: 2054 - DNA, 260 bp, Artificial Sequence
  Description of Artificial Sequence: Synthetic polynucleotide
cgccccaagttttatgaagattatcaatacgataaagtcgtccggttgcccggaatttgatggagggatgcattatgaagcgcactgtgacggtctgatcaaggtgatctggcatgacggccagggcgcttgcctgttcacgaagaagctggagcgcggccgcttcatctggccatcagcggccgatggcacggtggtgatcacgcctgcgcagctcggttatctgctggaaggtatcgactggcggatgccgcaaaaga

SEQ ID NO: 2055 - DNA, 260 bp, Artificial Sequence
  Description of Artificial Sequence: Synthetic polynucleotide
cgcccgaagttttatgaagattatcaatacgataaagtcgtccggttgcccggaatctgatggagggatgcattatgaagcgcactgtgcccgttttccgcggaagccgaagatcgcgccggagcccggtgcctccttgatcgccgtctcgaccagcgccgatagaccatcaatgccacgccgcatatccgtcaccccgcaggccagatagacacgcacattccccgaaggcccgatcatgccgcctccagacaggccgc

SEQ ID NO: 2056 - DNA, 260 bp, Artificial Sequence
  Description of Artificial Sequence: Synthetic polynucleotide
gtcaatgaactggatttgagaatctgtcagcatgacgacagggggtatcaacatggatgatcgctggagggcattgactggcgcaatccgcgctggacacaacgccctgcaaaggctggataaatcgcgctggtcggcctgtttttattggtgtcttacgtgcctgagtggtagacatccgccatgtcgaacgccgcttctgaactggttagattacgcgctgccctggctgccgccgaggcccgtgcggaggttgcaga

SEQ ID NO: 2057 - DNA, 260 bp, Artificial Sequence
  Description of Artificial Sequence: Synthetic polynucleotide
cggcccaagatttatgaagattatcaatatgataaggttgtccgattgcccggactttaacagagggatgcattatgaaacgcgttggcgtgaccggatgaagctcctgttcttcgatcggtccggttttgtgatggtgctgaagcgattgtcggaagaccggttccggtggccacgtcgggagatgatggtggtaacgctgacgaccgagcaattacactggattctcgacggcattgatatcgacgcgatggtccgcc

SEQ ID NO: 2058 - DNA, 260 bp, Artificial Sequence
  Description of Artificial Sequence: Synthetic polynucleotide
cgtccacggcaagcccttgagaaggtggcagacaggtccatgcctctgcccggattttgacacaagaggtgcattatgaaacgtgatcggccttcctcgcccggaagacaaaaatcgtcccggtgaacggatccttgcgcagttcgttcttcaccatcgcggccaggctgtcgtggcccttcctgaagtcgataggcttcgtggccaccatgacccgcacccggttcgatgggaagatcatgagccagcacgcagcgcca

SEQ ID NO: 2059 - DNA, 260 bp, Artificial Sequence
  Description of Artificial Sequence: Synthetic polynucleotide
cggcccaagttttacgaggattatcaatacgataaggtcgttcgactgcccggactctaacagagggatgcattatgaaacgcactgtggcggcttgatcaaggtgatctggcacgacggccagagtgcctgcctgttaacaaacgatcggcattcatactacacctctttcctcgccagttgatgttcttggctcggtttgcatttgccggtgcgcggcagcgcgatctttgaattggttccatcggctgcattgcttt

SEQ ID NO: 2060 - DNA, 260 bp, Artificial Sequence
  Description of Artificial Sequence: Synthetic polynucleotide
atcgcgcaacttgatctaagaatctgtcagcctaacaaggaggggcatcaacatgggtgatcgaacagcgcttcgaactgcacgcgcgtcagatgcatgacgccgtcgctgatctgcggccactcgaaacgaccatcgcggccaaggcgcttgtagaccaaaacgaggcccgtgccgtcccatagcaaaatcttcagccggtcggcgcgcttcgaacgaaaaaccacgatcaggcccgaatgcggatcgagcccaagcgt

SEQ ID NO: 2061 - DNA, 260 bp, Artificial Sequence
  Description of Artificial Sequence: Synthetic polynucleotide
cgcgaatatcgcgtcgagccgtcaacaacgcattcacgtaacgcaggaggtgcagtatgagttcaagcccttctcgttggcttttctgacgttgcaggcgacgatgtcgaccccccagtggcgcgcggcatcgaggtaacgcggattgaacaccggcgcctgaccaatcagccgctgcagcaccgcggacttcagattgtctaccatgaccttgcgcgggcagccatggaaggccgcgaacgcatgctcatgacaggcga

SEQ ID NO: 2062 - DNA, 260 bp, Artificial Sequence
  Description of Artificial Sequence: Synthetic polynucleotide
attaatcacctcgatctgagaatcattcagcctcaccaggaggggcatcaacatgcgtagtcgtgggaagggatcgattggcgtcgtcctgattggggtgcgccaccggcccgtgtcgggtgattttatcccactgaaaccactggtttttatggaaatttatcctgactcgtggtagtcaggatcatgtctagcgcgacgacaaatcttccggacgatccagcctttctcaaggcaatgattgccgctttacaggcgga

SEQ ID NO: 2063 - DNA, 260 bp, Artificial Sequence
  Description of Artificial Sequence: Synthetic polynucleotide
attaatcacctcgatctgagaatcattcagcctcaccaggaggggcatcaaaatgcgtagtcgagtgaggggatcgattggcgacacccgtcgtggacttccgctcccggtcgaacgggataaaagctatattttgcaggggcatcgggggtatattgctggtgtgctaggggcaaatcggctagatttgcgggtatggaaacagcgccgctagacagtcaggatgagctaactgctttgcgcgcactcgtcgcagaaca

SEQ ID NO: 2064 - DNA, 260 bp, Artificial Sequence
  Description of Artificial Sequence: Synthetic polynucleotide
attaatcacctcgatctgagaatcattcagcctcaccaggaggggcatcaacatgcgtagtcgccagatggacgttcaagaaaccacggcaagcatacccggacgccttcgccgaactggcgtcgccagcctgcacccacgacccgtacccgttcaagcggtggttgcgcgagcatgatccggtgcatcgcgcggcgtcaggcctctttctgttgagccgccacgccgacatctatcgcaagacacttcctgtcggcttt

SEQ ID NO: 2065 - DNA, 260 bp, Artificial Sequence
  Description of Artificial Sequence: Synthetic polynucleotide
gtcaaccagctcgatctgagaatctgtcagcctcaccaggaggggcatcaacatgcgtgatcgctggagggaatcgactggcggctgccgcagcacacggcccggcccgaacgggcgggctgaaaagctgcagacaagagggcgtgggcatgattcaatacccccatgtccagccccaatccgtccgcccccactgccgacaatctgcccgccgatctggcggcggcccatgcgctgatcctggcattgcagggggagtt

SEQ ID NO: 2066 - DNA, 260 bp, Artificial Sequence
  Description of Artificial Sequence: Synthetic polynucleotide
tacagttcgacagaaccgacttttatccctgttccatcaaccacacaaggtgcagtatgaagcgtacgccttatcacggggctttcttggccgtgctgggagcatcgctgtcgcgtagtggttcacgaattcctgcgccgtgcggccaagacccggttcgtatcggtcaggtcgtgcaatcaatgcgcgcggattatctgggaccagcaggctcggggcgcctccgtagaattccatggcgccgataagcccgccgatcc

SEQ ID NO: 2067 - DNA, 260 bp, Artificial Sequence
  Description of Artificial Sequence: Synthetic polynucleotide
tatggaagcaggtcgccgacgctcatcgccgtttcatcaaccacacaaggtgcaatatgaagccttcgccttgtcctgcggcttgtaagggcgcgcgggcaggatcgccacgccgtagtgcgcggcgaactcggcggtggtgcgctgcagttgcggctcataccggtcggcttgaccgatgagcgagcgcgtattgtcgggcacgacgagctcgggcacgccgccgatgaaggccagcgcccgggcgagcgagcccagcc

SEQ ID NO: 2068 - DNA, 260 bp, Artificial Sequence
  Description of Artificial Sequence: Synthetic polynucleotide
tatggtagccgccaaccccggttaattgacgctcaaccaacccaacaaggtgcatcgtgatgtctgctccttggcctgcggggtgttggcacagatgatgtcgatgttcagctcataaagcgcccggccgaactgcgtcaggccgctggtccggtccttctcggacgcatgggtggagcggaaaacgccgtgcttgtcgctgtagaaggccagcggcttgccccattgctgcagataggccttcgtcgcatgcagatagt

SEQ ID NO: 2069 - DNA, 260 bp, Artificial Sequence
  Description of Artificial Sequence: Synthetic polynucleotide
tacagttcgactcaaccgacgtttatcgctgttccaccaaccgcacaaggtgcagtatgaagcgtatgccttgtcctgcggacgatatacgcgcgcaggaaggaatgatgtgccgtagtgacgcgcgaagtccagcacagtgtcgccggcgcgaggttcatagcgatcgggatcggcaatcatcgcacgcgggttatccgggacgatcaactgcggcacaccaccatagaaggtcagcgcgcgagcgatcccgcccagcc

SEQ ID NO: 2070 - DNA, 260 bp, Artificial Sequence
  Description of Artificial Sequence: Synthetic polynucleotide
tatggtagccgccaaccccggttaatggacgctcaacaaatccaacaaggtgcatcgtgatgtctgctccttgtccttcgggcggcgcggccgggccggtaggacgccgacgccgtagtgggacgccatcatgccgtagctgcggttgatctcgggatcatggaagctggcgcggttgacgccggacttcaggttgtccggcacgatcagccggggcacgccaccgaagaaggcgaacatgcgcacgtgcgagccgatcc

SEQ ID NO: 2071 - DNA, 260 bp, Artificial Sequence
  Description of Artificial Sequence: Synthetic polynucleotide
tatggtggccgtcaacccagattaattgtcgctcaaccactccaacaaggtgcatcgtgatgtccgctccttgtcgcgcggccggcgcggtcgcgtcggaagaacagcgcttccgtaatgcgctgccatgccggcataggtgcgattgacctgcggatcaaaatggcaggccttgatgacggcgaccttggcgttatcgggaaccagcagcgccggcgcaccaccaaaggcctcaagcgccagcaggtggcattcaatcc

SEQ ID NO: 2072 - DNA, 260 bp, Artificial Sequence
  Description of Artificial Sequence: Synthetic polynucleotide
tatggtagccgccaaccccggttaattgacgctcaacaaatccaacaaggtgcatcgtgatgtctgctccttgtcacgcggacgtcggggccgcgtcggcaggacggcactgccatagtgagccgccatcgcgcaatatgtccggtttacctggggatcgaagtggcaggccttgatgatcgccaccttggcattgtcgggaaccagcaaggctggcgcaccgccaaagaactccagcgcctggatatggcattcaatcc

SEQ ID NO: 2073 - DNA, 260 bp, Artificial Sequence
  Description of Artificial Sequence: Synthetic polynucleotide
tatggtagccgccaaccccggttaatggacgctcaacaaatccaacaaggtgcatcgtgatgtctgctccttgtcccgcgggcgtcgcggccgcgtcggcaagacggcgctgccataatgggccgccatcccgcaatacgtccggttgacctggggatcgaagtggcaggccttgatgatcgctaccttggcattgtcgggaaccagcaaggctggcgcaccgccaaagaactccagcgccaggatatggcattcaatcc

SEQ ID NO: 2074 - DNA, 260 bp, Artificial Sequence
  Description of Artificial Sequence: Synthetic polynucleotide
tatggtagccgcaaaccccggttaattgacgctcaaccaatccaacaaggtgcatcgtgatgtctgctccttgtcccgcgggcgtcgcggccgcgtcggcaagacggcgctgccataatgggccgccatcccgcaatacgtccggtttacctggggatcgaagtggcaggccttgatgatcgctaccttggcattgtcgggaaccagcaaggctggcgcaccgccaaagaactccagcgccaggatatggcattcaatcc

SEQ ID NO: 2075 - DNA, 260 bp, Artificial Sequence
  Description of Artificial Sequence: Synthetic polynucleotide
tatggtagccgcaaaccccggctaattgacgctcaaccaatccaacaaggtgcatcgtgatgtctgctccttcgactgtgggcttcgcaccggtgtcgtgcaaggttccatgccgatgtcgcggagcaaggatgcggtgtccctggcaacaaagcaggagccgttgtcggtgagccattcgatgggctcggacagcatgttgatgcggccgaagcggttctccactgctgtgatcacgaggtcctgcacgtcctggctgt

SEQ ID NO: 2076 - DNA, 260 bp, Artificial Sequence
  Description of Artificial Sequence: Synthetic polynucleotide
cgcaaagcaacacaagcaaccttcatcgccgctccaactaccggacaaggtgcaatgtgaaacctactccttgctctgcggacttctgacaggtgtcgtgacgggcttcaggccgatttcccgcgagaacgtcagcgtctcgtcggcaatgtagcaggaaccgttgtcgctcagccactcgatttcgctgtcagccttcaacgcaccggcgaaacggttttcgaccgcctgaagcatcacgtcgcgcaccatgtcaccgg

SEQ ID NO: 2077 - DNA, 260 bp, Artificial Sequence
  Description of Artificial Sequence: Synthetic polynucleotide
ggcaaaaccacaggcaaatcaaccacccgcgagggaagtttccccgcacataccgcatgaggtgcaatatgcagcacactccttctcattcccccgcgcgatcgccaccgggcgaggctcgtagcgataatgaccggcgaactgcagcaaggtgggattgaagcggatcgcctgcccttgtcgctcgaggacggcgctcttcaggttgtcgtacagcagcactctcgccagccccccccaagcgccaaacgccccgacat

SEQ ID NO: 2078 - DNA, 260 bp, Artificial Sequence
  Description of Artificial Sequence: Synthetic polynucleotide
aacgacgttgaagggcaactcccaatgtttaccgaggtttcggaaggaggtgcacaatgaacgccccatcgcccatggtcgaatctggttctccagccagttattgtcgatgggcacgtgcccgtcatcgagatagcgcgtgagcgcttcccaacgcttcaggctgtagtcgagcgcctttgcgattgccgatccttcggcaacgagcttgcgctgggtcaccatccaggcgtgcaacgcatcggcaacgggtctggatc

SEQ ID NO: 2079 - DNA, 260 bp, Artificial Sequence
  Description of Artificial Sequence: Synthetic polynucleotide
cccgaaattttagacactttacgagaaaaaattcgccgtgtgcctgttaaatctgaataataccagtttgatagtgagccggaaataatagtttgtatacggttaaccccttggagtaattttgtactcaaggggttttactgtatatagggtgagggcttttcaataaacttttcaccatcaaaatgccaagcaattccatctgggtcgtgaagagaagtccattgcccaaaatttggagcatttttcttatgacgaag

SEQ ID NO: 2080 - DNA, 260 bp, Artificial Sequence
  Description of Artificial Sequence: Synthetic polynucleotide
cccgaagttttagagactttacgtgaaaaaatccgccgcgtaccagttaaatctgaataataccagtttgatagtgacccgaaaacaatagtttgtatacggttaaccccttggagtaattttgtactcaaggggttttactgtatatcgggtgaggacttttcaataaatttttcaccatcaaaatgccaagcaattccatctgggtcatgaagagaagtccattgcccaaaattggaagcatttttcttatgacgaag

SEQ ID NO: 2081 - DNA, 260 bp, Artificial Sequence
  Description of Artificial Sequence: Synthetic polynucleotide
gccagacgatcacgtcgcccgatatctcgagatccgcagcaaaatctctttgctttataagggcatcaccagatgagcagtatgaagcgccaacgtcgcagccggcaaaaagagagttcttggcgttgagcttgatcggccgcatcgcacgctcgacagcattggtgtgtgtgccttgcaaggcgcactgttctccctggtggaaccccaggccggctaactctcgctccagccggaagtattcggggcgggtcaggagg

SEQ ID NO: 2082 - DNA, 260 bp, Artificial Sequence
  Description of Artificial Sequence: Synthetic polynucleotide
gccaggcgatcaagacgtccgatatctcaggatccggttcaaaatccccttttattttaaggacatcgtcagatgagcagtatgtcgcgccaacgtcgctaccggcaaagagcgcattgcggcgattcatggctggtcggcggatcgcgttttccaccaggttggagtcgatatcgacgtggccgtcgtccagaaacagccggaatccgtcctgccgcgtcagcatataggccagggcttttccgaggtcggacttgcgt

SEQ ID NO: 2083 - DNA, 260 bp, Artificial Sequence
  Description of Artificial Sequence: Synthetic polynucleotide
gccaggcgatcaagacgtccgatatctcaggatccggttcaaaatccccttttattttaaggacatcatcagatgagcagtatgtcgcgccaacgtcggagccggcgaagagccagttctttcggccaattgcaatgccccgttcattctgcccatgtcggcgatgaagttgaggttctttatcgctggcatccttattttggccagagggtttccattcgccgtgttgaagaacgagcgacaggccggtttttgaaggt

SEQ ID NO: 2084 - DNA, 59 bp, Artificial Sequence
  Description of Artificial Sequence: Synthetic oligonucleotide
gaatgggacgaatatgaacgcaaccaggcgctgctcgccgccaacgcctatgggcaaaa

SEQ ID NO: 2085 - DNA, 260 bp, Artificial Sequence
  Description of Artificial Sequence: Synthetic polynucleotide
aaggattgggtgcgcacttcagggcatctacagcggcaacattccaacactcaactgtgagaggtgcattatgagatcaccgtcggaataccgagtggcctttcgccaccactagctttggggatccatacgcgcagcaagggctgaggccgataagtcttggcctttaactcttgctgcaatctttccagccagtcgtttcgtccatgttcttcgatatcctcgaaacgctctcgatcgactcccggcgcaccgcggtt

SEQ ID NO: 2086 - DNA, 260 bp, Artificial Sequence
  Description of Artificial Sequence: Synthetic polynucleotide
cccaaacaccccgcgggatcacaccccgatcagaaaaacctatccctctcaacaacatagacaaatgggtcttatgaaacaggattgtagtcgtgacgccaggcggccagcacggacctcgcttgaggcaggctcgtgaacaaggtctcgttcagacactcgtcccggagccgggcgttgaagctctcgacgaacccgttttgctggggcttgccgggcgcgatgtaatgccattccacgttccgctctttcgaccagcg

SEQ ID NO: 2087 - DNA, 260 bp, Artificial Sequence
  Description of Artificial Sequence: Synthetic polynucleotide
aagggtcgcccgtgtcgcgttgttgacgcggacatgcttccaatgtttacagatacttgaatacggagtgcataatgaaacacgcttcgcgatgcagcgcaacgcgcgttcggcagcattgttggtgaggcagatcctgccgtcgtcaaggaagcgggtgaacgcgtcccagcgcttcagcatgtagaggcaggccttggtcagatcatggccgcgcgacagcttggccacctgcgcggtgagccaggtgtggagctcgg

SEQ ID NO: 2088 - DNA, 260 bp, Artificial Sequence
  Description of Artificial Sequence: Synthetic polynucleotide
cgcgattgggtacgcacttcagggcatcttcagccgcaacattccaacattcaactgtgagaggtgcattatgaaatcaccgtcgggatgccaagctcgcgctcgccaccttccgccttctggatcgtcacccgtcgtaccggactgggccggtacgtcccccgcagcagttcctcacggatacgaggccactcggacgccagtttgcgcgacgtctggtcaatgtccagcccgtccacacccgccgaccccttgttcgc

SEQ ID NO: 2089 - DNA, 260 bp, Artificial Sequence
  Description of Artificial Sequence: Synthetic polynucleotide
ccaaaataccccacgggatcacatcccagtcaacgaagcctattttcttcaaccacatagacagatgggtgttatgaagcaggattgtaatgccgtcgccaggcttcgatcagcaccttggcctcagcgggctgtagaagatctcgccattgagcagttcgtcgcgaagcgacccgttgaagctttcattatagccattctcccatggtgatcccggtgcgatgtagagcgtcttcacgccgatcctggccaaccattgt

SEQ ID NO: 2090 - DNA, 260 bp, Artificial Sequence
  Description of Artificial Sequence: Synthetic polynucleotide
aagggccgcccgtgtcgcgctgctgatgcgggtacgcttccaatgtttacagacacttgaatatggagtgcacaatgaaacctgcttcaccaaaggtctgattgcccgctcagcggcattgttgctcatctcaagccgcccgtcagtggcgtaaaccgtgagagccttccagcgggaggtcatatagcggatcgccttggccaattcgcttttgccgctgatgcgcgtgagcgtaggcgctgtcgagccggtcgcacttc

SEQ ID NO: 2091 - DNA, 260 bp, Artificial Sequence
  Description of Artificial Sequence: Synthetic polynucleotide
aagggccgcccgtgtcgcgctgctgatgcgggtacgcttccaatgtttacagacacttgaatatggagtgcacaatgaaacctgcttcgccaagggccggatcgcccgttcgactacattgctgtcgatctcaatccgcccgtcgtcgacaaaccgcgttagcccgtcccagcgcgagagcgcgtagcggatcgcctcggccagcttgctcttctggctgatcagaccgagcttggcgcgcaaccacggctcgagagctt

SEQ ID NO: 2092 - DNA, 260 bp, Artificial Sequence
  Description of Artificial Sequence: Synthetic polynucleotide
ccaaaataccccacgggatcgcatcccgatcaacaaaccctattttcttcaaccacatagacagatgggtgttatgaagcaggattgtaataggtgatccatcggccaagaccagccttcagctccgatccggtctcgaaggcgtggaggtagacgcactcatacttcaaagatcgccagaggcgctcgatgaagacgttgtccatccatcgcccccgaccatccatgctgatgcggatttcagcgtcgcgcagcacgct

SEQ ID NO: 2093 - DNA, 260 bp, Artificial Sequence
  Description of Artificial Sequence: Synthetic polynucleotide
aaaggtcgcccgtgtcgcgttgccgacgtggacacgcttccaatgtttacagatacttgacgagggagtgcataatgactcacgcatcgcgattgggcggattgaccgctcgacggtattggagtcgagctcgatgcggccgttttcgaggaagcgcgagagtccttcccatcgggagagcgtgtagcggatcgcctcggcgagcttggtcttctggctgatcaggccgagcttttcgcgcagccaaggctcgagctcag

SEQ ID NO: 2094 - DNA, 260 bp, Artificial Sequence
  Description of Artificial Sequence: Synthetic polynucleotide
aaggcgcgcccgtgtcgcatcgccgacgcggagacgcttccaatgtttacagatacttaaagaaggagtgcgcaatgactcaggcccgccaagcggacgcatggctccttcagctatgttgttatcgatttcgacacggccatcgtcgatgtaaacgctcaatgctgcccatcgcgagagggcatatcgcattgcctcggcagcttctgcttttgtggcagcgtcgaaagcgtctcttctatccagctcttgagatccgc

SEQ ID NO: 2095 - DNA, 260 bp, Artificial Sequence
  Description of Artificial Sequence: Synthetic polynucleotide
acagatcgcccgtgtcacgccgacggcgggaagcagatctcaatgttttcaagcacttaacgaagaggggcactatgagcaggtcattgccacaccgcgcagggcgcgctcggcagcgttgttgtcgatctcgatgcggccatcgtctcggtaacgcgtgagcgatttccagcgtgtcagcgagtagccgatcgccttggccagttccgacttcgtggacaccttgcccagcatgctcgtgagccaggcacgcaggtctt

SEQ ID NO: 2096 - DNA, 260 bp, Artificial Sequence
  Description of Artificial Sequence: Synthetic polynucleotide
cccagacacccggcgggatcgcatcccgatcagcaaaacctcttttcttcaatagcatagaaagatgggcgttatgaagcatcgttgtacaacggtggttgcggggacccacataagccgagcccgacacttgttgtctgctgctgtataaacgctcacgacgaaagccttcttcggccccaaagcccttgggcgaccttctctcgtcgtcatagctggcgacatgacatcgaacgtctcgacctgatgggaagtactcg

SEQ ID NO: 2097 - DNA, 260 bp, Artificial Sequence
  Description of Artificial Sequence: Synthetic polynucleotide
gcgcggcgcctcagacgtccgccgtccggcaatccgctacaaaaagaactggaactctaacgagatagaaaggtgagcattatgaagcgggctcggttgccccggtgatgagcaaattctcgttgcggcggatccagtcaccgacgatgagcctggcgaagacggcgcgatcgatgccgcgtggcgtgcgccaatcgacatcttccacgcatgcggtctggcgcagcgcggcgaacttgaggcgggtcgtaagacgtttg

SEQ ID NO: 2098 - DNA, 260 bp, Artificial Sequence
  Description of Artificial Sequence: Synthetic polynucleotide
acactcagcccgtgtcgggccgtcagcgagaagcagatgtcaatgttttcaagcacttaacgaagaggggcattatgaacacgccattgcccatggccgaatcagattttcgagatggttgttatcaatctggacgttgccgtcggccagataagttgtcagcgcttcccagcggttcaggctgtagtcaatcgctttggccgtggcactgccctcgggcacgcgttgcctctcccgcttcagccaggcgtgcaggtcct

SEQ ID NO: 2099 - DNA, 260 bp, Artificial Sequence
  Description of Artificial Sequence: Synthetic polynucleotide
aagggccgcccgtgtcgcattgctgacaccgagacgcttccaatgtttacagatacttaaagagggagtgcacaatgactcaggtacggcaacgccgcgcagggctcgttcggcggcattgttcgtcagacacagtctgccgtcgtcgaggaaccgggcgaaggcttcccagcgaccctccttctcgaacatgtagttgatcgcctcggcgacggggttgtgcttcgacatttgcccgcgctgggccatgagccaatcgt

SEQ ID NO: 2100 - DNA, 260 bp, Artificial Sequence
  Description of Artificial Sequence: Synthetic polynucleotide
aagggccgcccgtgtcgcattgctgacaccgagacgcttccaatgtttacagatacttaaagagggagtgcacaatgactcaggtacggcaacgccgcgcagggctcgttcggcggcattgttcgtcagacacagtctgccgtcgtcgaggaaccgggcgaaggcttcccagcgaccctccttctcgaacatgtagttgatcggctcggcgacggggttgtgcttcgacatttgcccgcgctgggccatgagccaatcgt

SEQ ID NO: 2101 - DNA, 260 bp, Artificial Sequence
  Description of Artificial Sequence: Synthetic polynucleotide
aagggccgcccgtgtcgcatcgctgacacggagacgcttccaatgtttacagatacttagaaaaggagtgcacaatgactcaggtccgcctatcggacgtagtgcccgctcggcggcattgttgtcgatcgcgacgcggccttcttcgaggaacagacagagcgaagaccatcggctcaatccgtagcggaaagctgtcgccagatcgcttttgcccggaatgcgcgtgagttgagcttcagcccagtggcggaatgcat

SEQ ID NO: 2102 - DNA, 260 bp, Artificial Sequence
  Description of Artificial Sequence: Synthetic polynucleotide
aaaggacgcccgtgtcgcgttgctgacccggatacgcttccaatgtttacagacacttagagaaggagtgcacaatgactcaggtccgcctatcggacgcagtgctcgctcagcggcattgttgtcgatggcgacacgaccgtcttgcaggaacaggcagaacgaggaccatttgctcaaaccgtaccggaaggctgccgccgatcgcccttgccaggaatgcgagtcagttgagcctctgcccagatgcggaatgcttc

SEQ ID NO: 2103 - DNA, 260 bp, Artificial Sequence
  Description of Artificial Sequence: Synthetic polynucleotide
aagggccgcccgtgtcgcattgctgacacggagacgcttccaatgtttacagatacttagagaaggagcgcacaatgactcaggtccggcgaagcctcgcaacactcgctcggcagcattgttcgtgaggcagatcctgccgtcttccaagaatgacgcgaagccgtcccagcgcttcagcatgtaatcgatcgcctcggcaaccggagagctgcgcgacagccttgcccgctcggcccgcagccattcctggaactcta

SEQ ID NO: 2104 - DNA, 260 bp, Artificial Sequence
  Description of Artificial Sequence: Synthetic polynucleotide
aagggccgcccgtgtcgcattcccgacacggagacgcttccaatgtttacagatacttaaagagggagtgcacaatgactcaggtccggcgctaaaccggaagaatgctctcttcgctggtcatcacaccggagctgagaattgggcgaccatcgcctcgctgatcgagacgtgcaagctcaatgccgtcgatccgtttgcgtatttgaccagcacgctcaccgccatcgttaacggccacaagcagagccagattgagg

SEQ ID NO: 2105 - DNA, 260 bp, Artificial Sequence
  Description of Artificial Sequence: Synthetic polynucleotide
aggagcgaacacagtccattatcacaatcacaggatcagcagatccagctttttcaataacatagcgaggtgtgcattatgtcgtgggatcgctgggaccgagagcaatgacgttctcgcgtcgctcgatccactcgcatcgggccaactccagcacctgcatcttgttgagcttcgggatagcggcgaagtcgaaactgtcgaggcttttgacgaccgggaatttggccgccttgatccggcgatcgacctttcggcga

SEQ ID NO: 2106 - DNA, 260 bp, Artificial Sequence
  Description of Artificial Sequence: Synthetic polynucleotide
aagggtcgcccgtgtcgcaccactgacacggagacgcttccaatgtttacagacacttagagagggagtgcacaatgactcaggtccgccaaaaactctgatgtcgcgctccaggaggttgttgtcgatcggcatcctgccatcgtccgtgtagcgcgtcagataatcccactggttcagagtgtaggacacggcatcgcccagcttggtgtccggcaagaccttcggcgcgatttcatcgagccataccttgagagcgg

SEQ ID NO: 2107 - DNA, 260 bp, Artificial Sequence
  Description of Artificial Sequence: Synthetic polynucleotide
cacagaggcccgtgtcgcatcaaaatggaaaaccaaaagtccctgtttccggacatttgaagaggaggtgtagtatgaatcggtcgttgccacgcatcgcatggcacgctccgcaatgttgttatcgatctccagacgcccatcatcgaggaagcgcgtgagcgccacccagcgcttgcggccataggcgatcgctttcgccatctcggacttgggcgagaggcggcgcagggcatcgtcaagtgcttgccgcagctcat

SEQ ID NO: 2108 - DNA, 260 bp, Artificial Sequence
  Description of Artificial Sequence: Synthetic polynucleotide
tacagaggcccgtgtcgcattaaaatggaaaaccaaaagtccctgtttccggacgtttgaagaggaggtgcataatgaaccagtcgttgccgcctcgcgaatggcggtgctgtcatagcctttgtcgccgagcagggtagcgccctcggggatggcctctatcagcgcttcagcttcgcacgcatcatggacctgcccacccgtcagtcgcaggccgacaggacgcccataagcgtcgacaagagcgtggagtttggtcg

SEQ ID NO: 2109 - DNA, 260 bp, Artificial Sequence
  Description of Artificial Sequence: Synthetic polynucleotide
tacagaggcccgtgtcgcattaaaatggaaaaccaaaagtccctgtttccggacgtttgaagaggaggtgcataatgaaccagtcgttgcaaaaaccctgatgtcgcgttcgagaagattgttgtcgatcggcatcctgccgtcttcgacgtagcgcgtcaggtattcccactggttgagggtgtaggagaccgcatcgccaagcttggtgtcgggcacaaccttgggcgcgatggcatcgagccatgccttgagggcat

SEQ ID NO: 2110 - DNA, 260 bp, Artificial Sequence
  Description of Artificial Sequence: Synthetic polynucleotide
caaaagctcaaagccggcaaggtggaccgcctctctcccgtccctcggttggcttgttgaggagggcactaagatgcgtgatcgaacatcttgttcgcgtacatgtcgacgaccgggtgctcatatccgtcgagagccttcgtctcgagagcggtgtagacctcggtgaacgccatcgggacggcgttgagtcccatcgcattgaagctggccagggccatcgggctttgcatcacgcgaaccttgagccctttcatgtc

SEQ ID NO: 2111 - DNA, 260 bp, Artificial Sequence
  Description of Artificial Sequence: Synthetic polynucleotide
tacagaggcccgtgtcgcatcaaaatggaaaaccaaaagtccctgtttccggacgtttgaagaggaggtgcataatgaaccagtcgttgcaacgctgcgcagttggcgctccgcagcgttgttcgagagacatatccggccatcggcgaggaaggtggtgaagcccgcccagtcgttctggaggtaggcgatggccttggccacggcatcgtgacgagagagcttgctacgcgtctcacgcatccatgcctctagttcag

SEQ ID NO: 2112 - DNA, 260 bp, Artificial Sequence
  Description of Artificial Sequence: Synthetic polynucleotide
aacggtggcccgtgtcacctcgaaacgcaaaatcaaatcccaatgtttccaaatacttgagaaggaggcgtacaatgaatcagacatcgcaaaaatcctgatgtcacgctcaagaaggttgttgtcgatcggcatcctgccgtcttcggtgtagcagtgttggtttccacgcagaactgagccggttccaacctttcctcgcgtgttttcagcgtgatccgacgctggcatcgtcgagagcatctatcgatccgggagat

SEQ ID NO: 2113 - DNA, 260 bp, Artificial Sequence
  Description of Artificial Sequence: Synthetic polynucleotide
cctagataccccacgggatcgcctccagatcaggaaaatctattcccttcaacaacatagaaagatgggcgttatgaaacaggattgtaatcgtcgacccattcggcgatggcgctgcgggcatggccgagaccgaagaacaggctttcgttcagcagttcgtcgcgcatccttccgttgaggactcgacataaccgtgtctcacatcggctttcccggtgcgatgtagtgccagtcgaccttgtggtccttcgcccagg

SEQ ID NO: 2114 - DNA, 260 bp, Artificial Sequence
  Description of Artificial Sequence: Synthetic polynucleotide
cctcgccaccccgcgggatcgcctccagatcaggaaaacctattcccttcaatgacatagaaagatgggtgttatgaaacaggattgtaatcgctgcgccagtttgaaagcgctgatcgagcgtgggtcaatgacgagaagagcgtttcattcaagagctcgtcgcgcagccgaccattgaagctttcgatgaaggcgttctggatcggtttgcctggtgcgatgtagtgccaatcgactttggtccggtcggcccattg

SEQ ID NO: 2115 - DNA, 260 bp, Artificial Sequence
  Description of Artificial Sequence: Synthetic polynucleotide
cctcgccaccccgcgggatcgcctccagatcaggaaaatctatttctttcaatgacatagaaagatgggtgttatgaaacaggattgtagtcgtccgcccattcggcaatggcgcttcgggcatgatcgagaccgaagaacaggctttcgttgagcagttcgtcgcgcatccggccgttgaagctctcgacatagccgttctgcatcggcttccccggcgcgatgtagtgccagtcaaccttgtgatccttcgaccaagc

SEQ ID NO: 2116 - DNA, 260 bp, Artificial Sequence
  Description of Artificial Sequence: Synthetic polynucleotide
ccccgacaccccgcgggatcgcctccagatcaggaaaacctattcccttcaatggcatagaaagatgggtgttatgaaacaggattgtagtcgtttctccagtcttcgataatctccctcgcatggcggtagctggtgaagaggtgctcgttaaggcattcatcgcgcagcctaccgttaaagctctccacaaagccattttgcatgggcttgcccggcgcaatgtagtgccactcgacggcgtggtcctgttgccattt

SEQ ID NO: 2117 - DNA, 260 bp, Artificial Sequence
  Description of Artificial Sequence: Synthetic polynucleotide
cccagacaccccgcgggatcgcctcaaaatcaaggaaacctatttacttcaacaacatagaaagatgggcgttatgaaacaggattgtagtatctacgccaatcctccatcttttcgcgggcatccgcaagggtcaggaaccaatcctggttcaggcattctgcacggaagcggccattgaacgcttcgatgaaagcattatcagtcggcttgccggggcgtgagaagtccaacgtcacacccttggaataggcccacag

SEQ ID NO: 2118 - DNA, 260 bp, Artificial Sequence
  Description of Artificial Sequence: Synthetic polynucleotide
cctcgccaccccgcgggatcgcctccagatcaggaaaatctattcctttcgatgacataggaagatgggagttatgaaacaggattgtagtatctacgccaatcctccatcttttcgcgggcatccgcaagggtcaggaaccaatgctggttcaggcattctgcacggaagcggccattgaacgcttcgatgaaagcattatcagtcggcttgccggggcgtgagaagtccaacgtcacacccttggaataggcccacag

SEQ ID NO: 2119 - DNA, 260 bp, Artificial Sequence
  Description of Artificial Sequence: Synthetic polynucleotide
cctcgacaccccacaggatcgcatccagatcaggaaaacttattcccttcaacaacatagaaagatgggcgttatgaaacaggattgtaatcgtccgtccattcagcaatggcgcgcttcgggcatgatcgaggccgaaaaacaggctttcgttgagcaactcgtcgttgttgcgaccccagggaatcatcggttcaacccaaaagccagagcgtttttcagcagcctgctagaccgtctttccgacacatgtccttcac

SEQ ID NO: 2120 - DNA, 260 bp, Artificial Sequence
  Description of Artificial Sequence: Synthetic polynucleotide
cctcgccaccccgcgggatcgcctccagatcaggaaaacctattcccttcaacaacatagaaagataggcgttatgaaacaggattgtactctctacgccaatcctccatcttcgcccgcgcgtcgtcaaggctcatgaaccaatgagcgttcaggcactcggcgcggaacttgccgtagctttcgatgtagctgttgtcggtgggtttgcctggtcgcgagaagtgaagcaggacacccttgtggtaggcccacaggtc

SEQ ID NO: 2121 - DNA, 260 bp, Artificial Sequence
  Description of Artificial Sequence: Synthetic polynucleotide
cctcgacaccccacaggatcgcatccagatcaggaaagcttattcccttcaacaacatagaaagatgggcgttatgaaacaggattgtaatcgctgcgccagtctgaaagagctgatcgagcgtgggtcagtgacgagaagagcgtttcattcaagagttcgtcgcgcagccgaccattgaagctttcgatgaaggcgttctggatcggtttgcctggtgcgatgtagtgccaatcgactttggtccggccggcccattg

SEQ ID NO: 2122 - DNA, 260 bp, Artificial Sequence
  Description of Artificial Sequence: Synthetic polynucleotide
cccaggcaccccgcaggatcacatcccgatcagaataccctattccctacaacagcatagacagatgggtgttatgaaacaggattgtaatgccggcgccaggcttcgatcaggatctgggcttcagccaaggtgtagaagatctccccgttcaagagttcgtcgcgcatcgagccattgaaggactcgcagtagccattctcccatgggctgccgggtgtaatgtagagcgtcttcacaccgatcctggtcagccattc

SEQ ID NO: 2123 - DNA, 260 bp, Artificial Sequence
  Description of Artificial Sequence: Synthetic polynucleotide
ccgtcggtacgccgtccggtaacagacgatccggatcagcagacctttgattttcaatgacgtagcgaggtgggcatcatgacgcgggaacgggctggccgaggaaatggaccacctcgtgccggtcgacgaagtcgagctgcgccaaggtcatgatcctgtcgcggtcgagcgaaggctggaaggagaagtcgaagccggtgagcgtcttgatggagagaagccggcccatcttcagggctgccttgatgcggcgcccc

SEQ ID NO: 2124 - DNA, 260 bp, Artificial Sequence
  Description of Artificial Sequence: Synthetic polynucleotide
cctcgacaccccacaggatcgcatccagatcaggaaaacttattcccttcaacaacatagatagatgggcgttatgaaacaggattgtaatcgctgcgccagtctgaaagagctgatcgagcgtgggtcagtgacgagaagagtgtttcattcaagagttcgtcgcgcagccgaccattgaagctttcgatgaaggcgttctggatcggtttgcctggtgcgatgtagtgccaatcgactttggtccggccggcccattg

SEQ ID NO: 2125 - DNA, 260 bp, Artificial Sequence
  Description of Artificial Sequence: Synthetic polynucleotide
ctcgcaaaaggagtcggcggccgatatggtagccgccaaccccggttaattgacgcttgacaaatccaacaaggtgcatcgtgatgtctgctccttgtcacgcgggcgtcgcggccgcgtcggcaagacggcgctgccataatgggccgccatcccgcaatacgtccggttgacctggggatcgaagtggcaggccttgatgatcgctaccttggcattgtcgggaaccagcaaggctggcgcaccgccaaagaactcca

SEQ ID NO: 2126 - DNA, 260 bp, Artificial Sequence
  Description of Artificial Sequence: Synthetic polynucleotide
cgccaacaaacgcaaactgagccaagaacatcaactggcgaggaaagaggtgtagtatgaacgctgatcgttgtatgccatcaccagaccgctgccatcccagtagatcagcttcaaccggtccgcacagtgcgcttcataatgcatccctccatcagattccgggcaaccggacgactttatcgtattgataatcttcataaaacttcgggcgtcgatcgatgacaccctgcacccctatccggacggcttccgaggat

SEQ ID NO: 2127 - DNA, 260 bp, Artificial Sequence
  Description of Artificial Sequence: Synthetic polynucleotide
aaagggcgcccgtgtcagtcgccgccggaaagtcaaattccaatgtttacagatacttgaagagggggtgtataatgaacactgcgttccaaaaatcctaatatcgcgttcgagaaggttgttgtcgatcgacatcctgccgtcttcggtgtagcgcgtcaggtattcccactggttcagggtgtaggatacggcgtcgccgatcttgctatcgggcaagaccttcggcgcgatgtcatcgagccatgccttgagagcga

SEQ ID NO: 2128 - DNA, 260 bp, Artificial Sequence
  Description of Artificial Sequence: Synthetic polynucleotide
gcccgccgtctgagacgtccgccgtccagtaacccgctgcaaaaaactcttgaactttaacgacatggacaggtgagcattatgaagccggctcgctgggaccaagcgcaatgacattctcgcgccgctcgatccattcgcaacgcgccagttccagcacctgcatcttgttgagctttgggatggcggtgaagtcgaagctgtccaggcttttgacgaccgggaaccttgccgccttgatgcggcgctcgaccttgcgg

SEQ ID NO: 2129 - DNA, 260 bp, Artificial Sequence
  Description of Artificial Sequence: Synthetic polynucleotide
cgtgttaagttcatcaacggaaagacggtcaaaagtgaaaggagcaccaaccatgagtaatataaagacagcggcaaacgtgacacttatccctgcaaaggagcaggcaaacagcgtatttacaggcaaaaagctgaaagtggcggcttattgcagggtcagcacagacgaaaccgagcagatgaacagcttcggagtacagatcgcgtactacaccgactacatcggcagccgacccgactggcagatgatcggcattt

SEQ ID NO: 2130 - DNA, 260 bp, Artificial Sequence
  Description of Artificial Sequence: Synthetic polynucleotide
gccagcgacctggctgggactgtcaggaattctgtgcggtgggccggtttcatcagttgaagaaccgctcgccaaagatgacggcgaactgtgtctttgcctcgacccattcccgcggcgcccgtttccattgctcggccgcgttgttaagaacgagatataacagcttcatcgcggcttcgtcaccagggaaatgcccgcgggaacgcacagctcgccgaagcttcgagttgagggcctctattgcgttcgtcgtgtag

SEQ ID NO: 2131 - DNA, 260 bp, Artificial Sequence
  Description of Artificial Sequence: Synthetic polynucleotide
atgagtcagcttcgcaaccgggtacgacgcaccaagcgttcgaagaaggaggcatcatgaagtcatcggctcgccgatcagcgcgtgccattgatcgacggggagctggctggtgacgatggtggagcggtggccgtagcggtcctcgaggatctccaggaggtcgtggcgggccgcggcgtcgagcggctcgaggccccagtcgtctgatggcaagcacaatttggcacttcgaacgacttggacggctgcgatcgtat

SEQ ID NO: 2132 - DNA, 260 bp, Artificial Sequence
  Description of Artificial Sequence: Synthetic polynucleotide
acaaagacgcgcaagtcgaaaccactacccaaaccggcccgcacgcctcgaatgaaatgagcgcaagcgaattcggataataaggcggcccctatcgtgggccgctttttattcgtcgtcgctatcctgcaagagtccttcgggcgtagagtagatccgtaataggctttcgccgacaaggacctgtcggtacgataggatagccaagtcccaaatttcttgtgctacttctggccccgcgtcgaggactttgccatctt

SEQ ID NO: 2133 - DNA, 260 bp, Artificial Sequence
  Description of Artificial Sequence: Synthetic polynucleotide
aatctgggcggtgcggcgaagttactcgggataacgccaaagggtgatgtcacgttgtgagcggcttaacggttgtcggataatgggttgggatgaacagtcctgccgtcagctacaagaaccaccgctttccaccgcagatcatcgcccgtgcggtctggctgtatttccggttccctttgagcctgcggatggtcgaggaaatgttgttggagcgcggcattgtcgtctcctatgaaacgatccggcgatggggccgc

SEQ ID NO: 2134 - DNA, 260 bp, Artificial Sequence
  Description of Artificial Sequence: Synthetic polynucleotide
ttcgtcccggtcagcagtttaccgcagagagagccgatgaaaggagtacaaacagcatgaatatcacttacacacagaacggcgattatcttatcccgaacatcattatccgcaagaccaagcccctcgggcactacggcagactccgcaaagcgtatctggaaatgcaccgtccgatactgttcaatgagctggtactatccgacaagctctttgagcattgcgccgagattgacgaagcggcacgaaatcgcatggag

SEQ ID NO: 2135 - DNA, 260 bp, Artificial Sequence
  Description of Artificial Sequence: Synthetic polynucleotide
cgcatgacgctgtatcgtcgcctgcaacggttagggattcaactgcccgagcggcagtagagacgggccagcctggctggcccgtgcgtgatcactgtggcggacgtaccagaattttgacctgctgtttctctttcaccagcgcttcaaagccctgttcaaccagatcagccagttcaatacgtttcgtcaccagtttgtcagcctggaagtagccctgcgccatcagttccatcactgccgggaagatatggcgatag

SEQ ID NO: 2136 - DNA, 260 bp, Artificial Sequence
  Description of Artificial Sequence: Synthetic polynucleotide
aaacgcctcctgatccgcggcgaacccgcccagccacgaccgagcgaaccgaaggactgaaggggagggggattggtccgacgatccagaggaggatcgcaggagaccccccatgcccatcacgatcgaccttggcggcgcccccgccaacgaagactgtgcccagctcggccacacacccgatttcgccgccgtcaatcgcctggaggtcgacgcctaccgcgccgccctgattgcgctgttcggaacgccgcccgaag

SEQ ID NO: 2137 - DNA, 260 bp, Artificial Sequence
  Description of Artificial Sequence: Synthetic polynucleotide
agctctgttgtccaaactaaacacagaacatcatttagatatagaaataggggaagatgaattatctgaaattgacttttcaaaagacgcaacttatggagaaattaaaaagtatgtgttagataaatacggactaaaagtttcaagcctatatatcgcacaagtaaaaaggaaacatggtctaatagagagagaaaattataattttagtaagaaagaaaatcaaagagtgccaaattgcccagaagaaaaagaaaaag

SEQ ID NO: 2138 - DNA, 260 bp, Artificial Sequence
  Description of Artificial Sequence: Synthetic polynucleotide
gcctgcaaccgaagaaaattgctgcttgtcagcgggttcgttgaaaggctcgttgcatgacatagtcgattgataaacagtcgtttttatcaatattttgtctcgcctcagccttgccggtcagaccgtgtcagtcagccagtcctccgttcgaagaccctccacccgctgaaattcccgcagattgccggtcaccacaatcagccctttgctccgggcatgcccggcaatcatgagatcatacggacctatgatacggc

SEQ ID NO: 2139 - DNA, 260 bp, Artificial Sequence
  Description of Artificial Sequence: Synthetic polynucleotide
tgcgccggatgggccggcgccgagcctcccgcacaggggacgagccatgcagcagaatagcaaagtgtttgtcggtctggatacgtccaaactgaagatcgcggtcgccgtggctgaagacggccgtcagggtgaagtccgttttctgggcgagatcgacaacacgcccgaggcagtgcggcgcctcgtcagtaagctcagtggcaagcatcgcgagttgctgttctgctacgaggccggcccgaccggctatggcctgc

SEQ ID NO: 2140 - DNA, 260 bp, Artificial Sequence
  Description of Artificial Sequence: Synthetic polynucleotide
gagggctgcaaatccttgcacctgacggcaaaggaagcggtggcgcggaacggcttatgaggcttcgtgccaatgggatcaggcactttgtctagcatgtgtcccaaccacaggatggtccggagtgggtctcgcagtgatattctcagagaattcgacacgtccggtttcgtgaggattgctgcctttgggcttacgtctcaggggtgccagaactagacgttccttggttcaaggaaatgcgtcagccgttcgagccc

SEQ ID NO: 2141 - DNA, 260 bp, Artificial Sequence
  Description of Artificial Sequence: Synthetic polynucleotide
gttgacaaattagtgttggttgcgggggcaggatttgaacctgcggccttcaggttatgagcctgacgagctaccgggctgctccaccccgcggccgttttgcgtcttgagcgattgtttgcttctgacgcggatgattttgatcgttctggagatttcgtttcttttcaggtctggcggcgacctactctcccacgtcttgagacgcagtaccattggcgcgacggcacttaacggccgagttcgggatgggatcgggt

SEQ ID NO: 2142 - DNA, 260 bp, Artificial Sequence
  Description of Artificial Sequence: Synthetic polynucleotide
gatgtgctgcattcagagccgaagtgcgagtgtagtaaatggaaaatggaattgatttagaaaacgacttggtggcgtttctgaaagatatagtcaaaaatgatcatgattatatttctgaagttatagcagagtctcacagtattttttctctgaatgggaacaggaatggagacgaggaggattatacatatcttgaagatgattacaactgaatcaaaagtataaaacaatgaaaggaaatgaaaattatgtctgaa

SEQ ID NO: 2143 - DNA, 260 bp, Artificial Sequence
  Description of Artificial Sequence: Synthetic polynucleotide
gacataccaaaaccggcaaaggcaaaggcaaaggcaaaacagaaaaagaaaacggtctgaatctgaatcagaacgccatgccgggtggtattggcatggcgtcagaaatgcattcagcgcagaaacgttatttttttctgcttcttcaaggaggtgaacaacatagtcccacaagccgatgttcatcttcttggcagacaaaaggaatttattcaggtcattgtgttcatgaacaagcaagtatgactcaaggcttcttg

SEQ ID NO: 2144 - DNA, 260 bp, Artificial Sequence
  Description of Artificial Sequence: Synthetic polynucleotide
ctgaaagacataccaaaaccggcaaaggcaaaggcaaaacagaaaaagaaaacggtctgaatctgaatcagaacgccatgccgggtggtattggcatggcgtcagaaatgcattcagcgcagaaacgttatttttttctgcttcttcaaggaagacaaggcaacacgcgaaggcagattattcgccatcaatacgcaagcctgtttgaagcatctgcataacagccagattaatcacagcggccctgctttgcccaagat

SEQ ID NO: 2145 - DNA, 260 bp, Artificial Sequence
  Description of Artificial Sequence: Synthetic polynucleotide
cccgagcaagtaaagatggttgcggggacaggatttgaacctgtgaccttcaggttatgagcctgacgagctaccgggctgctccaccccgcggtggtttgttatcgttcagagattgagcttctcgtcaggtctggcggtgacctactctcccacgtcttgagacgcagtaccattggcgcgccggcacttaacggccgagttcgggatgggatcgggtgttttgctcgtgctatgaccaccagacctgaggagaagct

SEQ ID NO: 2146 - DNA, 260 bp, Artificial Sequence
  Description of Artificial Sequence: Synthetic polynucleotide
agcatgaacgagaaatatgacataacatatcatgtggtagatttgagggaacaagaatgaatgcagtagagataattgatttcaataaacttgagtcaaaagatagattaaagaatgtttgtgcttatgctagggtttcaacaaaaaaagaactccaagaaacttctctagacttacaagttgaaacatatacgaaaatgataatggataatcctaaatggaacttcgttggtgtttattctgatgttgggaaaagtgga

SEQ ID NO: 2147 - DNA, 260 bp, Artificial Sequence
  Description of Artificial Sequence: Synthetic polynucleotide
ttccgcatcgagatcacgggcgacctgctcaccttccttctgccgtccgcgtcaaagtagggcactgacggcaccacgccaccgaagcctccccacggggaggcttcatgcatttcggcgtccaggtcgctcggatttcgcagcaatctcaacacgctgaggcggaaccgcgccatctgccaggagtcccgccgaaacccgtagatttcgggggtatcaggggcatgataccaaccagatgatctcccgcctcgcagagg

SEQ ID NO: 2148 - DNA, 260 bp, Artificial Sequence
  Description of Artificial Sequence: Synthetic polynucleotide
gaagtggtagcgggagagggctaccgccaattcaccgctgctaccgagttcgtctgttgaatgtactcgcaagcagggacgacagaatcacatcctgtcccctggctgtggtggccggctgatttgaactgtcatcagaggcccgcaaagttcccgtaaaccagacatgcaaacgataacacttgaggccgcggttgcgccaggttcggtgaatcttccatgtgccgcacgccaccttggctcccggccttcattgtcgt

SEQ ID NO: 2149 - DNA, 260 bp, Artificial Sequence
  Description of Artificial Sequence: Synthetic polynucleotide
ggaatgtcggtttcggtggttgcgggagtaggatttgaacctacgaccttcaggttatgagcctgacgagctaccgggctgctccatcccgcgacacgtggttgccccttggttttggggtaacgcaaaaaaggcggctttggggccgccttttttgacaatgtgaatgggtttttgctgattttgcgcgagcttcaatgcctggcgacgccctactcttccagtgcttgagcaatagtaccatcggcgcagactggttt

SEQ ID NO: 2150 - DNA, 260 bp, Artificial Sequence
  Description of Artificial Sequence: Synthetic polynucleotide
aatataagtttggacaatgatgaacaagttgaggctatagcgttgatacaaaagatgtaaatttagaaatccttcatttcaagcaattttataagcattttgtcttcgataaagatgaagaaggatacgtcaaaaagactcaaaaaaacttcatggatgtaagagttgttttgagactagtatgaggagacacaaagaaaaatttaataagataaactcattttgtactttctacaagagtggcttaaaaagctgctctt

SEQ ID NO: 2151 - DNA, 260 bp, Artificial Sequence
  Description of Artificial Sequence: Synthetic polynucleotide
gcaggccgaactttgcaccattgtccaacacgtcctgatcctgcaccggatgtggcgtgacaacacggacttccggtggtcgcgccaggaagggcagcccgcatgagatagacacccaaagagatccgcctgatctggcggtacgatgtcccttgtcgggacgaggcagcagccatcgcgtgggcaccgttgcggcctgaaacctgaacctcagggagcagattgaccgcgtatgcaacatggcgaggctgaggcttccg

SEQ ID NO: 2152 - DNA, 260 bp, Artificial Sequence
  Description of Artificial Sequence: Synthetic polynucleotide
ctttcgcaagaatcgttggttgcggggataggatttgaacctatgaccttcaggttatgagcctgacgagacggcatctgacgggatgctgccgcccgggcctcgtgcaaaagagcttgataattgattgaccacggtcgccgacgttatcgaggagacatccctctcgtcgaactttgatcggccagttgtggaaaccaaggggttacgctggatctggtagcggaggagggattcgaacccgctcgaccgctccctgg

SEQ ID NO: 2153 - DNA, 260 bp, Artificial Sequence
  Description of Artificial Sequence: Synthetic polynucleotide
ggaaatacttatactccagacgaatacattttaatgattcaaaagactttaacaaaataacccctggtaactacaaaaggtttacccctcctgtagataagatataatgttctcaggaggatttatgactatttacgcctatacccgcgtttcaaaagccgaaaatgaaaccggcacgacaaataatcagattattaacattgaatcacaattaaagatagataacgtatattctgatgtcaatatttctggctcaatgc

SEQ ID NO: 2154 - DNA, 260 bp, Artificial Sequence
  Description of Artificial Sequence: Synthetic polynucleotide
gccgccctccagagtgccgggagcattccgggccagatggcggggagcatggtctcgtgatgtacggctaccaccggaccaagggcgcccccatcgtcggcgccctcccggggcaggacggccccttcggccaccggcccgcgcccgacgaggacgacgacgccctcctggacatcgaggagccggacgccatggtgcccgcgccccgggacgggagcgggcggtgacgacgttgtggcggcaggtcctggccgcgctca

SEQ ID NO: 2155 - DNA, 260 bp, Artificial Sequence
  Description of Artificial Sequence: Synthetic polynucleotide
acaccttacaagattagaaaaacactatttgaaacaacaagtaaaatttcatgcttttagctaattgtatcaagcagaaaactgtgttatattaaaagtgcgacatagtcgcaacttatcccttacatagcatgtgtgtatttacacacacatccccttccttaaggccaccgagaggtggtctttttattatgttttctatcaagttcaaatccgatagcgacctcaaaaaatagccattttaggcaaaagttcaaatc

SEQ ID NO: 2156 - DNA, 260 bp, Artificial Sequence
  Description of Artificial Sequence: Synthetic polynucleotide
gtagaaacggcggcgttcggcgttcatagttctgttctgaaatggcgcgccatttgctgaattgccacccgcgttcaagaagcttcaatccatcttgctgcaacgccccggcggtgaccgtgacatggtggaaattctggcccttgtattgcaccacgatgaaggtgcggtactcagtgctgtggaattggcattggagtgtggcaagccatcgaaggagcatgtgcttaatctgttgggacgtttgaccgaagaacctc

SEQ ID NO: 2157 - DNA, 260 bp, Artificial Sequence
  Description of Artificial Sequence: Synthetic polynucleotide
acccctatcctaaggtttaatttcatttttgacctcacagccactaataatttccactaagaaaagtagtaagtatcttaaaaaacagataaagctgtatattaagatacttactacatatctaacgaaaaaaagaagcttactctgccttcctttccagagcagcttctaataaatgttgagcaaattgtttataaaactcatctaagtcattacttgcttcatcctgagttatatatcgaatactgtaattttctttc

SEQ ID NO: 2158 - DNA, 260 bp, Artificial Sequence
  Description of Artificial Sequence: Synthetic polynucleotide
accgaaatactgatcattttcaagggcggttatgaatgtaatgccgttgtggaaaagtgaataataacagcctgcgttcttgcgtatcagtaagcggcgcaggctgtttccgtcttagggcaagtatacggcacttttgatttttggcatgacaaaaaacgtccgaaagcagagccgtcaaacgttcgtaaaactctcaattttgcacttcaacccgaaaaaagtatgcaaatacacagctttttcaggactgatttgac

SEQ ID NO: 2159 - DNA, 260 bp, Artificial Sequence
  Description of Artificial Sequence: Synthetic polynucleotide
aacgaggtgcagatcatcttcaaggatgggcatgaaatgaatgtggcggtagagaagtaatgttacatatgcaggaggtcacagcctacgatttttcggaagaaattagttgtgacctcttgcaattttgtttgatatagggtataatagaatagataaagtgtatcgtgttacgatcacggaggtgatttttatgggaacatatctcaatcccggcaacagcggatttgaggaagtgctgaatggtgactacattgata

SEQ ID NO: 2160 - DNA, 260 bp, Artificial Sequence
  Description of Artificial Sequence: Synthetic polynucleotide
gggggacgcgtggtagcggaggagcgactcgaacccccgcgaggtggtcgatgcgtgtgacgcatttgtagcgccatcaatcgcgaaaaatcacatcggagcattgcactcgacggtcggcccatccaagaagtcgaccggtcccgacctcactcgtcgctgtcggcggagtcgacgttccatcggggatcgagaacgttgtcgatttcaaaattgatcccgtcgtcctggaagcgctcgagttcgggcagttcgcggag

SEQ ID NO: 2161 - DNA, 260 bp, Artificial Sequence
  Description of Artificial Sequence: Synthetic polynucleotide
acacatcgagaagcctgcttatatacatacaacttcctgatacccgcaaaaaccaaataatttctcaataggtttccctgatggcgcggtattacccgcgctttattttttggttgttatggtgattgtagcataattttttaaaccccgaaaggagcggttacatggtattagacataatccttcctgatccagatccccctctccagccaggggaaggaggtggcaaaaatgagtaagaggtgccaggttaggtatgt

SEQ ID NO: 2162 - DNA, 260 bp, Artificial Sequence
  Description of Artificial Sequence: Synthetic polynucleotide
aatggaatgaaggttgaagaagaatttattaaaaagagaggagtcaacggacttcagtaaaggagagatttttatggctagggtttcagtaataccagcaaggcaagtggctgttataaatggagttcagagggaagataaaaagagggtttgtgcttactgtagagtaagtacagatacagaggagcagcttaccagctatgaagcacaagttacttattatgaaagttatattaaaggtaaaccagagtacgaatttg

SEQ ID NO: 2163 - DNA, 260 bp, Artificial Sequence
  Description of Artificial Sequence: Synthetic polynucleotide
tttaaagcgatagtatcttacagtatagatatagaaaataatgaaagtaaaaaaaaatagccactaacatggaattatatagtaaatcttcgtattctcgcagctctaccacagccccgttgattatcatttatcatttgagcttcatctattacacatacatcataaaaagttcctgtttgaagtttttcaatagttgaagaaacatgtgttccataaggaataatatcttcctcttctcctgtaagaagtgaacatga

SEQ ID NO: 2164 - DNA, 115 bp, Artificial Sequence
  Description of Artificial Sequence: Synthetic polynucleotide
accttcaatggagataccaaagaaatttcaattgatttatggggatctaaaaaaaaatagatgctgacatggaagattatgagaaaatatcgcaattcaatatgtcatgcacatt

SEQ ID NO: 2165 - DNA, 260 bp, Artificial Sequence
  Description of Artificial Sequence: Synthetic polynucleotide
ttgattgaatttatctgtattcaaaatggtaaagttgattttattagttataacctatgaaagactacttagataatttatatttagaatatttgaagttggaagagcgtgcttgggaagggataagtaaacagtgttattgtgacattgctggcttctctcctgaatgcgctagttgcccttcccatactttaatgagaagaaacataattaaacttcaagacgaccaatacttattttgtacatttgtaaaccctatt

SEQ ID NO: 2166 - DNA, 260 bp, Artificial Sequence
  Description of Artificial Sequence: Synthetic polynucleotide
cttctccaagctgaagcagttccggcgtgtcgctacccgttacgagaagactgcccgtaactatcttgccatggtcaccctcgccgccaccatcctctggctcaggtaagggtccacagaacctagtgcgccggtcatccgtcaaggtgcgagcgcgctctctgccagggcgaggcgcatctcgccgataaagcggcggcccagcggtgagagcggcttgcggttcgaccagaaggtccaggcggtggcagggatggccg

SEQ ID NO: 2167 - DNA, 260 bp, Artificial Sequence
  Description of Artificial Sequence: Synthetic polynucleotide
ggagataccgggaacctcacaataaagttctggggagataaaaaaaaattacttctttagaggtacagtacccttcattgcactttggtacagcgagcagaagccatttgtaccaaagtgcaatcgttactcaacaagtttacatcaacttgtatgaagaattatataaacatctttgtgaggaaacagttggcaaccgtatagaaaaaagtagattaattaaaaacttatcacaatatcaattaggaaaattgataggt

SEQ ID NO: 2168 - DNA, 260 bp, Artificial Sequence
  Description of Artificial Sequence: Synthetic polynucleotide
tatcaggaattttgtgataattgggacacgctgaacagcaaaagtacgatcaatgcttagtttaatattttgatatttttcgcatagacttgaccgaaaggcaggtctattaaaaagctgtgaatttgcgttatgaataatcaaaagagctagagcatgcggctgttaaccgcagggtcgttggttcgagtccaacagggggagtaaaatccagggctctgaaatgacgtagatacgttgtttcagagcttttgctttta

SEQ ID NO: 2169 - DNA, 260 bp, Artificial Sequence
  Description of Artificial Sequence: Synthetic polynucleotide
ggtaaagaacgtactcaaaaagtagaaatcaattataggtttctagcagtgtctcattgatacattctctgaaggaaatgggcgaagtatgcggatttggttggatcttatgttaaagaaagaactacaaaaggtaattgattggaatttagtagataaggaagactatttatctgctatggaacgtagtccaatcaacgatttagaaattagtcatttactttctcaagcactaacagaacaaatccatgatcgtcaac

SEQ ID NO: 2170 - DNA, 260 bp, Artificial Sequence
  Description of Artificial Sequence: Synthetic polynucleotide
agtttggtggaggtggagtttgtttataagattggaagtgtagttaaggagatattgtaatttaagaaatagaggcaaagggtactactatggtaggtgtaaaatacttactatagtatatttttgctttgtagaataatatataaatttgatgaactaaattaatgttaaaataatgtaaaaaggtgtacaattaaattgtagaattatgtttgtttatggtggtggaaaatataatgaaaataattttgagtagaaaa

SEQ ID NO: 2171 - DNA, 260 bp, Artificial Sequence
  Description of Artificial Sequence: Synthetic polynucleotide
agcgctgataaggtcgttgtgaagttttgtggtggcgagaaggtaacagttaaggtttaatattttatcatctttgcggtcatctctttttcaaaagtggaatatgcttggtttacgatgagcaaggaagttgaagttacaggaattaagatgacagcttcagttcctgagaatattcaagtttcacttggtgctggtacaaatggtacagcaggtttaacaggcgcttcgtttgtggaagcaaacgatggttcaactcg

SEQ ID NO: 2172 - DNA, 260 bp, Artificial Sequence
  Description of Artificial Sequence: Synthetic polynucleotide
aatgaggttagagttgaggacaaaaaagttatcatcgatcaaaaattcaaaatgatttaagggactgtccgcaaagccgggcggtttttttgaatcataaaacaaaaaaccattcatagaatggttaatttgttattgacaatcccccaaatcaaacctattatattaactaaaggaaggttgtccataatttccttctaaaaaacattttagttaatacaaaaatccgggtctaaccggcattttaaattaactatgga

SEQ ID NO: 2173 - DNA, 260 bp, Artificial Sequence
  Description of Artificial Sequence: Synthetic polynucleotide
aataagtataaatttagcagtaagtctagtatatggagtataagaaaaaagcataattagacatataacttatttggtatggttaagtagataaaaaatagcaataatttaatggaatattggcaaataaaagaaaaacgtgttaatataaatatactaaataaaatatgtgtaaacaatttggaaggtgaatagaattgagtagatatgatgtagtaagtataatgaaggatatgacagattctttaagaaaaaatatt

SEQ ID NO: 2174 - DNA, 260 bp, Artificial Sequence
  Description of Artificial Sequence: Synthetic polynucleotide
tcggaaaataacgtgtcattaatttttaaggatggaactgaactggaattgaatatctagagcatacaaaacccgcagaagaactagttttttcttgcgggtttttttgtggtttattcaaatctccgagatactatttaaaagaaaaagtaaattccgtttagacatacaaacggaacttactttttcttttaaggtttttttgatattaactaaggtttattaatcttgcttgaagaaaggtaaacatttaacttgcg

SEQ ID NO: 2175 - DNA, 260 bp, Artificial Sequence
  Description of Artificial Sequence: Synthetic polynucleotide
catagaaatcaaagtatcacgtttaagtttcatagtggtgtaacaattaaaacgagttaagtcgcttattaaaaaggcggcttttttgtatttttataattaagaaaatatgttataattttagttaagagaatatcttggaggagcacatcatggataactacgaagttgcgatcaatgggactactttagctgcacggattctaggtatagaaactcctaacgtgcagtttttttataaccaagatttaacgaaaaaa

SEQ ID NO: 2176 - DNA, 260 bp, Artificial Sequence
  Description of Artificial Sequence: Synthetic polynucleotide
cgcaccatctcccgtgtccgcgccggcatctacgggcagtcgaagcgcccccagacgtgaaaagaccccagccacaaggctgaggtcttcacacgacgtaacaaacctaggcgtacccagggttgcgtggtataatcaaaggtgccgagatgtggccagtgtcccgatgacaccggccctctcggtcgtggggcctcccggctccacgttccctctacagcagaaggagaagcacatgggagtgcatccccaagacacac

SEQ ID NO: 2177 - DNA, 260 bp, Artificial Sequence
  Description of Artificial Sequence: Synthetic polynucleotide
gacgaggatacgatccggttcgtgttccgagttggtgaggtagtgagggttcagctgtaggaggttagagggaaatttttagcccgttcgtgcatgagcgccggacgggcttttctcatgcccagaaatcgtggcagcagcgaagtgatagtgctcggggagcgtttctgcaggtcagagctaacgcgctatacactcgctaacgcaagcgattttcttggcccccttggggcatactcgctaatgcaaacgcctactta

SEQ ID NO: 2178 - DNA, 260 bp, Artificial Sequence
  Description of Artificial Sequence: Synthetic polynucleotide
gataccctcgacctgctgtatgaaattgccgcaccggtcgccattgcggaggcagcctgatgtccgccacacgcccacagcagatcgagctcatcccgatcgcgcggattaccgtccttaatccgcgcgcccgaaacaaacggcagcaccgggagatcgtgaacaatatcgagaccattggtctcaaacgtccgatcacggtgagccgccatgatggcccgagtggcccgcgctatgatctggtctgcggagagggccgc

SEQ ID NO: 2179 - DNA, 260 bp, Artificial Sequence
  Description of Artificial Sequence: Synthetic polynucleotide
gacaccctcgacctgctgtacgaaatcgccgcgcccatcgccattgcggaggcagcctgatgtccgccacacgcccacagcagatcgagctcatcccgatctcgcggatcactgtccttaatccgcgcgcccgaaacaaacggcagcaccgggagatcgtgaacaatatcgagaccattggcctcaaacgtccgatcacggtgagccgccatgatggccctagtggtccgcgctatgatctggtctgcggagagggccgc

SEQ ID NO: 2180 - DNA, 260 bp, Artificial Sequence
  Description of Artificial Sequence: Synthetic polynucleotide
cagttacgaaccgatttttcaaagcgtgatgtaaaaaaacaaatcagcttgattttgtaaaacagctatcacacattggtggctgttttttcgttattgatgtatcggtatttgggttgaactgtagatgaaaattcttttgctactcggtgattaggaaggagtggtataccactccttcctaatcaccgagtttgatactcttggaaaagagcttgtatcttagggataaagggattgtcgttgtttattattatgga

SEQ ID NO: 2181 - DNA, 260 bp, Artificial Sequence
  Description of Artificial Sequence: Synthetic polynucleotide
attataatagatcaaaatgggaaaacagaatatattttaaaaataaatttagagcaataaaaagtaactcggaaatttgagtttctttttattgctttttaatatcacaaatatggacgtgctatgggttgtcatttagaaatatgctagtttcaaagaaagtatttttctcggcaaaaaggtgaaggagttatgccaagaaaaacgtttactcggtattaagttagtaatggtatacgtaaaaaagaatctattttcaa

SEQ ID NO: 2182 - DNA, 260 bp, Artificial Sequence
  Description of Artificial Sequence: Synthetic polynucleotide
ctcaacccccttatccggctggcagagcgagcctctgtcgggagcgcggcctggaattgaaacgtttaagcaaagacgccgcttaccgtgcgttggagaacagcggcaacagacatgcgaggagtatcgctgctggtcaactagggtccaaggcaaagctttttgcgcccgaacttttggcgacctacgacgcggaatgcaaacgcatgcgcgatttcataacaggagcagaagagtctgaacggtgcctggaccgtatg

SEQ ID NO: 2183 - DNA, 260 bp, Artificial Sequence
  Description of Artificial Sequence: Synthetic polynucleotide
gagacgctcgactacctctatggaatggccgcccgggcgcggctgcgggtggcggcgtgagcgcagatcgccagcaggagcttcgacagatcccgatcgatcgcatcgaggtgctcaacccgcgcgagcgcaacagccgggcctttggggagatcgtcggcaacatcaagaccatcgggttgaagaagccgatcgtcgtgacaccgcggcgtgggcctaatggcgacgaacgctacctgctcgtgtgcggcgaggggcgc

SEQ ID NO: 2184 - DNA, 260 bp, Artificial Sequence
  Description of Artificial Sequence: Synthetic polynucleotide
gacacacttgactacctttatcgcatggctgaacgcgcgcgccttcggagggtagcatgaatacatgcgcaaacccactcgtagtccgaaccgtcccgatcgagcgcatcgagataatcaatcaccgtgaccgtaacagtcggatatttgaggagatcgtcgggaacattcaggcgattgggctcaagaaaccgatagtagttacttcgcgaatagcatcggacggcactgaacgcttcatcctcgtttgtggggaggga

SEQ ID NO: 2185 - DNA, 260 bp, Artificial Sequence
  Description of Artificial Sequence: Synthetic polynucleotide
acagtctatgaaggccacttcgtcatagccttcaaatctggcatcgaaatggaaatatgaaaaccagaagtaaatagcccatgactctacagtagagttgtgggttttcttttgcttgctgattataataatattttaataactattgtgtttatcaaccaaatggtttataatattcttagcgtaaacttggaggtgctgtatgactacggcagaaatgattaaagaactgtgtgagcaaatgaatataagtgtttccg

SEQ ID NO: 2186 - DNA, 260 bp, Artificial Sequence
  Description of Artificial Sequence: Synthetic polynucleotide
gcttcgcttgatcctgtagttgagatggcgagacgagaaccaatgccggcaaatatatgagaactacgaaagcccggcttcgcgacttcgtcacaaacaatcggcatgccattcggctgacggtagattcgcgggcgccgatgaacccgctgcgtgtctccggtttgttgaagacctacaggcgccaagtcgacaatatgcaggaattcatcagggaagccgacgcggtgaaacaccagatggaaagcgtcgtcgatgcc

SEQ ID NO: 2187 - DNA, 260 bp, Artificial Sequence
  Description of Artificial Sequence: Synthetic polynucleotide
cccgtttcatccttcatcagcagccttgcctacctgtgtggagacacgctgattctctgaccctaccccattcccgcaagcgggtttactgcatttcactttttaaaaccgatccgttctatcggtctacacagtagcgggactgactgtccggtaaacctacggtgttccagcaaacacgcccagtgtctgcaagctgccgcattatatcgctgcctctgcaggctaaatgcctgtctgacatccaggtttgccattat

SEQ ID NO: 2188 - DNA, 260 bp, Artificial Sequence
  Description of Artificial Sequence: Synthetic polynucleotide
gcttcgcttgatcctgtggttgaggtggcgagacgagaaccaatgccggcaaatatatgagaactacgaaagccgggcttcgcgacttcgtcacaaacaatcggcatgccattcggctgacggtagattcgcgggcgccgatgaacccgctgcgtgtctccggtttgttgaagacctacaggcgccaagtcgacaatatgcaggaattcatcagggaagccgacgcggtgaaacaccagatggaaagcgtcgtcgatgcc

SEQ ID NO: 2189 - DNA, 260 bp, Artificial Sequence
  Description of Artificial Sequence: Synthetic polynucleotide
gcagatctgtctcgattcattcggcttacagaacgtgtacccatcaggagggcggcatgactgacggattacccgaaatcaaatccatcccgatcgacgcaatcaatgtcctcaatccacgggttcgtaataaaaagattttcaatgagctcgtaaccagcattgcccatttgggactgaagaggccaatcacggtcagcgtacgggatgacaattctgtatacgatctggtttgtggccaagggagattggaggcattc

SEQ ID NO: 2190 - DNA, 260 bp, Artificial Sequence
  Description of Artificial Sequence: Synthetic polynucleotide
tatgaagataagctcaccgttgaattcaagtctgggattgagattgacgaagagatatagaatattaaccgccaattaggggctagcaccctttggcggttaatattggatttttttaattttaaagttgcttaaaacgacttgttgtgttaaaatatacgctgatacaaataagaatttaggaggaaccgaaactatgacagcctcaatgcgtttaagataagctggcaataaaaaaagcagaatctatccccgatgat

SEQ ID NO: 2191 - DNA, 260 bp, Artificial Sequence
  Description of Artificial Sequence: Synthetic polynucleotide
agatacaccgacgtgcctgccgttgcgactgcaatcgccgacatcgccttaaacttgtgaccgtagtcttcagttggcccttggcattcgtcctgtgctatcaagtacgccaccgttccttgaacgagcgcgacgtcagtcaacgccgatcacgcgtttgacgatgacagggttatgttagctgtattggccgctggcggcgccagttgcagatgatcgtggcgcttcgcgagttgtccggtggcgcaactgtccagcag

SEQ ID NO: 2192 - DNA, 260 bp, Artificial Sequence
  Description of Artificial Sequence: Synthetic polynucleotide
agaaaaacaacttggaacagaagagatgaatttgtcatagaattatacaccaagatttaacttaatatactattaaaattaataacccccatcatcgttttgatcaaaagtttataaccttctctttatttagatataaatttaccttaatagtaatttagtacttcaaactcttagctcatagggaaaatattttatattcaaaaaaagaaccaacctgtataagttggttctttttcgctacttattactatacaaac

SEQ ID NO: 2193 - DNA, 60 bp, Artificial Sequence
  Description of Artificial Sequence: Synthetic oligonucleotide
gatcatgacgagtactttaactttgtacccggtactgagaagaacaccttcagattgtac

SEQ ID NO: 2194 - DNA, 260 bp, Artificial Sequence
  Description of Artificial Sequence: Synthetic polynucleotide
actttcaggctgcccagcggacttgaatttacagaaaggttggataggaatggcaattaaaaagaccccctacggctacatttgggcagagggcaggatcgctgttgatattggtgaagccgagataatccgccgtatctttgacgaaaaggcaaacggcttatctggcagtaagatcggtgcagcactctatgatgaacagataccctatttctcggaggataagaaaaaagctatcgacaaggtgtacggcattctcc

SEQ ID NO: 2195 - DNA, 260 bp, Artificial Sequence
  Description of Artificial Sequence: Synthetic polynucleotide
gtttctttggaggtttttcgtgaacccggaaacgcggcaaataattaccgtcccgattgacagcattacgattctcaatccgcgagctcgaagcaaggtcaagcaccaggaaatcatagacagcattgcggctgtcggattgaagcgacccattacggtcagcttgcgttcaaccgacgacgggtacagcacgtacaacctcgtgtgtgggcagggacgtattgaggcgctccggctgcttggttatttggaggcgccag

SEQ ID NO: 2196 - DNA, 260 bp, Artificial Sequence
  Description of Artificial Sequence: Synthetic polynucleotide
attgttcatcagattactattcgcaacgcagaagttgaagaagtcattttgaaaatttaagtctgtagctaacttggctctatgaatacgcaagaaagttttaatttaaacaagctcagatgtgaagtagcaatgcaacaagcgttgcagtcatggcaaccaaaaccacaagtttctggcatggaatgtccaaaatgcaattctcatctccttgggaaacatggtcgagaaccagatggtgtacaacggtatatctgtaa

SEQ ID NO: 2197 - DNA, 260 bp, Artificial Sequence
  Description of Artificial Sequence: Synthetic polynucleotide
cttggtataggtgaggcgtacagaacccgtgtccacaaattatacataaccaaatattaacataaaaataataaatcctcatataaatctgtaaaacatagttccattataatcaatgcaaattttcacataaataatttttttcaactttactccagtctattacattccatatatttttaacataatcagctctcaaattctgatactttaaataatatgcatgttcccaaacatcaattgttaatattggcttcatc

SEQ ID NO: 2198 - DNA, 260 bp, Artificial Sequence
  Description of Artificial Sequence: Synthetic polynucleotide
gacccgggtcagctggtcagcgcgctggcctatacggacgatgaaacgcttgtgctttaagccgggtggcgaagacatcccatatcagagagcgtaaaagccggctctgaagagcgggcgcaccttatacatgcgcccgctttttcagaggaagtgaatatgctttttaccgtggaagggcgaaacgcccacgcgcgcctccacctgaaagacgtccatcagcagcgattcggtcagcacctcgtccggcgtgccgctgg

SEQ ID NO: 2199 - DNA, 260 bp, Artificial Sequence
  Description of Artificial Sequence: Synthetic polynucleotide
tccgcccagcaggcgataagtactcttaaatatatggttgatggtgaggtttatttttgagtaataatcactttttcaaccgtgctatggtatgaaagtaaagtaactaatatgatattaactatcttgaacgaagcgccctgagctatagttttactataggcactgtcactggatgttggcattcttgctctagtagctcaacaatacccaatcacaaaacaattcactgataacaaactttgtgcacgtgcttggtt

SEQ ID NO: 2200 - DNA, 260 bp, Artificial Sequence
  Description of Artificial Sequence: Synthetic polynucleotide
aaaaaaattgttgttctcgatagtcaagttactactatagaattaaaggttagtggctagtaatttgggctcttctacttctcgtctgataaattattcattgaaaaaaggcagacggcagaaagcagaagggaaatataaaatcattgggttaatattttttttcatcccttcttcctagaataataagagatgcttaaaaccttacttcttcatctcaaaaaacaataaaaatcttataaatactaaattttaaatac

SEQ ID NO: 2201 - DNA, 260 bp, Artificial Sequence
  Description of Artificial Sequence: Synthetic polynucleotide
gtggacgaaacgctgacattccgcctgcaatgcggtcttgaatttacagaggtggtgtaattatggcagtaagaaaaacgccgtatgggtacataatagcgaacggcagaatcgcagtcgatgctgaggaagcagaggtcatcaagcgtatcttttccgatcgtatcagcggtctttcgggcgtgaagataggcgcggcgctctttgccgagcatatcgagccattcaccgaaagcgagaaaaaagcggctgacaggatt

SEQ ID NO: 2202 - DNA, 260 bp, Artificial Sequence
  Description of Artificial Sequence: Synthetic polynucleotide
gactgcgggcgctacgaccgcctgcgcgcggtgcgggagggatgccatggaacggcatgagctgatggcgctgatggccgagctcagcttggccggcatgcgtgccgcctacgacgaggtgatgagcgacgggctgaagcggcagcgcaccgtccagcagatcctgggcgatctgctggcggcggagcgggcggagaagcaggcgcgctcgatccgttaccagctcggcgccgccaagctgcccctggccaagacgctgg

SEQ ID NO: 2203 - DNA, 260 bp, Artificial Sequence
  Description of Artificial Sequence: Synthetic polynucleotide
ttgatgattaccaccgttgccgccacaagcgacagcttgaacattacatggaaaatctgacgggcggtaatcctcccgtcagaccgttaccccgtgtagtcccttgtaaactgtactttactaatatcaaaactttctctatccaatgaatttattttaaaactaaaaacaagttccgtaaatgaaatttctttattttcaaaatttaatgcgtaaaaaatattttgattaaattcaaattcactataagaaaagtcaaa

SEQ ID NO: 2204 - DNA, 260 bp, Artificial Sequence
  Description of Artificial Sequence: Synthetic polynucleotide
gggcggcgagcaccgagcaaggagtggtggaaggatatcgacttgcgctggaaggactgaatattaggttaggtcgtcctaacattacataggtggaccattgttagtttcgcgcccttcctatctggctgcacattattccgaggacgctcccggccgcccggccgtgctttcctgaatcattttagaacgttggcgaactgcggccgggtggaggatgaccagcgccgggggccggtgccggcggtcggccaaccgta

SEQ ID NO: 2205 - DNA, 260 bp, Artificial Sequence
  Description of Artificial Sequence: Synthetic polynucleotide
atttttaaacatccatttttacattatccagaggtgcatacatgtgaagacaattcgtgatgttttagaaaaaggaaaaaaaggagccttttatgcgagggtttcgtctgatcgtcaaacaatcgatgcgcaaaggcatcatgtatatgaatttataaaaaactatgaatgtgaaattgtgaaagaatatgtagatcctggagaatcggcatttaaaaagaagttaatcaagcgtccccaaatcatggcgttattacgag

SEQ ID NO: 2206 - DNA, 260 bp, Artificial Sequence
  Description of Artificial Sequence: Synthetic polynucleotide
ttgaactttttcttcgacatggcccggcgcgtttccgtttccgaggtgacaccatggtgagcgatatcgaaacccacgccgaggttcagattatccccattgcggccatcaccgtggaaaatccgcgagaacgatctgaaaagacctttcgtgcgctggtggacagtatcggcaaggtcgggctgaagaagccgatcaccgtcgcgcaggatgacacggcgtcaggggatgcctatcggctggtctgcggtcaggggcgg

SEQ ID NO: 2207 - DNA, 260 bp, Artificial Sequence
  Description of Artificial Sequence: Synthetic polynucleotide
gtcttcttaaatatgccacatcgacctaagtggctccccggacaggacttgaacctgtgacctaatgattaacagtcatccgctctaccgactgagctaccggggaatagatggcgaatcttaaatggattcgacctgtgggtcaagagaatatcaagatattatagatcatttttcaatgaattgttgcaacctgttcatcgcatcctctaaaactcccatgcttgttgcaaaagacaaacggatgcatccttcagtac

SEQ ID NO: 2208 - DNA, 260 bp, Artificial Sequence
  Description of Artificial Sequence: Synthetic polynucleotide
gcagatctgtctcgattcattcggcttacagaacgtgtacccattaggagggcggcatgactgacggattacctgaaatcaaatccatcccgatcgacgcaatcaatgtcctcaatccacgggttcgtaataaaaagattttcaacgaactcgttaccagcattgcccatttaggactgaagaggccaatcacggtcagcgttcgggatgacaattctgaatacgacttggtttgtggccaagggagattagaggcgttc

SEQ ID NO: 2209 - DNA, 260 bp, Artificial Sequence
  Description of Artificial Sequence: Synthetic polynucleotide
gatgacctcgctattctctatcagattgctgcgcccgttaacctgtcggaggctgcgtaatgtctgctcttcattcaagtcatatagaaatgatcccgatttcacgcatctcagtgctcaatccgcgcgcgcgcaacaaacgacagcatcgggatatcgtgaacaatatcgaagccgttggtctcaagcgcccgatcactgtcagccgccacaatggcccaggcgggccacggtacgatctggtttgcggggaaggccgt

SEQ ID NO: 2210 - DNA, 260 bp, Artificial Sequence
  Description of Artificial Sequence: Synthetic polynucleotide
gacgacctcgctattctctatcagatcgctgcacccgttaacctgtcggaggccgcgtgatggctgctcttcattcaaatcatatcgaaatgatcccgatttcacgcatctcggtgcttaacccccgcgcgcgcaacaaaaggcagcatcgggatatcgtggccaatatcgaagccatcggtctcaaacgcccgatcactgtcagccgccacaatggcccaagcggaccacggtatgatctggtttgcggggagggccgc

SEQ ID NO: 2211 - DNA, 260 bp, Artificial Sequence
  Description of Artificial Sequence: Synthetic polynucleotide
ctggtcaagcgcatcaccgtgcagacggacggcagtgtcgacatcgagtgggtggtgtagaggtacggttcgcgccgcttcagctgccgtgtactcggtctcgtaaggctgggcgagagcagattgagtttcaattgcgctgctcgtgtgaattcctgtgagttcgagggcgtggggttctcgggcgaggacctcgcggtgatgttcagccggaacccggaggcgacccgtgcggagatcgcgcgcaagaaggaagcgcg

SEQ ID NO: 2212 - DNA, 260 bp, Artificial Sequence
  Description of Artificial Sequence: Synthetic polynucleotide
gattcgttggactacttctatggcatggcggagcgattccgcctcaggagagcggcatgacggcaagcgcacagccagaacttcggatgattcccatttctcgcattgaggtgctgaaccctcgggatcgcaaccaggaggtcttcaatgagatcgtcgagaacatacagaacatcggcttgaaaaaacccatcacggtgaccccaaggatcggggacgacggcgctgagaaatacctgctcgtttgcggcgaaggccgc

SEQ ID NO: 2213 - DNA, 260 bp, Artificial Sequence
  Description of Artificial Sequence: Synthetic polynucleotide
gcgacgctcgaggcgctctacgaactgatgcgtcgcattcccctggcggaggtggcgtaatggcaagggaacgaaaggaagacgttccccaccatgtcgggggcgtacaggagatccggtcgatcccggtcgaccatgtccgcatcgtcaatccgcgggcaagaagcccgaagatctttgcaggcatcgtcgagagcatcgcgacggttggtctgaagcgaccaatcaccgtcacggaagcccggcgcgacgatggcggg

SEQ ID NO: 2214 - DNA, 260 bp, Artificial Sequence
  Description of Artificial Sequence: Synthetic polynucleotide
gagccgattgccacgggggtggagcttattcaggctttgcgagtcaggctggcgcaatagcctagtcggggtcgccttggcacatcaagctcctttaaatgaaggcgatttgggcggcgccggcgaccgtccggtcctggccgaggttgtgtggaaactccgttgatggtcgcctatattgagccaacccgtctgagccaggtggctgcccatgaagcgattcatcgaaggcgaggaccgacagcaggtcactctgctgc

SEQ ID NO: 2215 - DNA, 260 bp, Artificial Sequence
  Description of Artificial Sequence: Synthetic polynucleotide
ctgccagagaggcaaaagcccgccggaccccgccaagtctacaaagtcaaaaaacaataataacaacaagttacgcgaatttttaaattaacaaaatttatatttgtagcaaaaaaaacaaaaaaacgctgcaaacccgaagggatgcagcgtttgtcattttttagctatgcacctgctctaccagctgagctagggtggcaattagtaattgatttaacattttgtttttacaagtgattttctctgttttggtctac

SEQ ID NO: 2216 - DNA, 260 bp, Artificial Sequence
  Description of Artificial Sequence: Synthetic polynucleotide
atctatgcgaagaaggtctccgccctgaccaaggcgctcaatcgcaaggaagagcgctaggaagcggcggagacattgcgcggcctgatcgagaagatttcgctcacaccggggccggaacgcggcgagatttacgcaacgctgcacggcgaactgggcacgatcctcaattggacggagcgtcaagccattggaaaggctacaaaaacaaacactcccggaggtgatctcacgggagtgtcgttatcagtggttgcggg

SEQ ID NO: 2217 - DNA, 260 bp, Artificial Sequence
  Description of Artificial Sequence: Synthetic polynucleotide
cttttagcaagggttgtgattgggaagggtgaggtgactagcgttctgttgaaggtttgagggaagttttgtttaagtctatctacaattgattgaggtttttatttatgcccaagttaactttagagcgattccatgaggcggcttcaagatttgaaaaggctgaagccgaagttcaacgagcttggaaacaaggttgtcattgccctgcaccgggcgaacgggttgagtgttggacttgcccgtactacaagaattta

SEQ ID NO: 2218 - DNA, 260 bp, Artificial Sequence
  Description of Artificial Sequence: Synthetic polynucleotide
aactgcgaaattgtttttaaacacccattcttacgtactcaagaggtgttaacatcatgaagctttctcatatattacaaccaaatatgaaggctgctttttatggccgtcattctacggataaacaagacatggatatgcaattgaattcggttatggaagtgattcgcaaatatgattgcattcatactcattcttttcttgataaggctgtttctgctcgtaaaaataaaattacaagtaggaaagaacttgaaaat

SEQ ID NO: 2219 - DNA, 260 bp, Artificial Sequence
  Description of Artificial Sequence: Synthetic polynucleotide
ggcactcccggcgcccgcagcctcgacatcaaccgcgtacggcctcactggggggtatgagcgagcaacgacatggatgttgcgctctgctctgaggctgatcgagacatccggacatgctcgtgaccaccgtgaattcggggaaagctcctcgccgtctgccggacgtctgcaatccggtcggaactacgcggttgtcggcgcggcgcgatagcgtcctcattaccgacgataggatcacggcattaggtggtactgag

SEQ ID NO: 2220 - DNA, 260 bp, Artificial Sequence
  Description of Artificial Sequence: Synthetic polynucleotide
tcagtacgactacccccccctcttcttttttttgaagggggtagttatctaactctttaattatctaagagttatctacggcaccgcattatgggacctaccgaccgcattatgggacctaccgaatcgcttttaccgcattatgggacctaccacaccgcattatgggacctaccgatttttcggattacctccagtgctggattttccagggagcgggttttcaaaggacaccatcccctcttttttctcgtatcgga

SEQ ID NO: 2221 - DNA, 260 bp, Artificial Sequence
  Description of Artificial Sequence: Synthetic polynucleotide
ttctcacagctccaggagcggcaccaagcggcggtcgaagtggccgaatgcgagctctgactcctcgtcagccgtctggaagacttctcagccaaggtaaaagcagggcttgcccgccttgataggatcggcatgcggcagatcattcgcaccgtggttcgccgggtcgaaatcgacgacgcgcacgtcgagatcgtcttcagggttcccccactcgagggcccaactggcccaaaatcaccaagccaggcgaccagttc

SEQ ID NO: 2222 - DNA, 260 bp, Artificial Sequence
  Description of Artificial Sequence: Synthetic polynucleotide
tacaccagggaggcggggaagattgacccgaaccgcgtcgacatcacgcctatcggctagcggcgctagtggccgtcgcgtaggaaccgctcggcggcgtgcaccgtcgaccgcacgctgaccgcttcttcgcggtcgcgggcgatcgcgtagtcggtgcacgccaggatgaactgttcaaggtgtctgacgatggcggcgataccgacggtgccccagccagtcagcatgacgatgagcgccagcgggagcatgacggg

SEQ ID NO: 2223 - DNA, 260 bp, Artificial Sequence
  Description of Artificial Sequence: Synthetic polynucleotide
cgtgcgggtaagaatccaattccacctgtaatcaaagttatggatttcaaattaaaataaacacaacctaactgcatttatttaatgtagttaggttgtgtttaattgaccaaacactatataactacaataaaagagcacagcgtgtatataaagtgcgaccaacactctatataccgtccgcctaatccatctaggcaaacacttgctgtactcttacgaactattttacagtacgtaagggctccttagcaacagtt

SEQ ID NO: 2224 - DNA, 260 bp, Artificial Sequence
  Description of Artificial Sequence: Synthetic polynucleotide
gtgatgtacagagagaaaggaaggggtaagaaaatctctcttgattacacgttgaagtaaaccgaacctgtttaaaagttaaggttgggcagctaacccaaacagacggaacgtttctcgtttcccgtaaaaaaatcgacaacttctcatgggagatgctgaaaggaagcactttcctcggccagcgaaaaggcggcatgccacaaatggtcggtgaatttgtgttgaaaaaacacggcatcgatccgcacaaagactta

SEQ ID NO: 2225 - DNA, 260 bp, Artificial Sequence
  Description of Artificial Sequence: Synthetic polynucleotide
gtaatatacagagaaaaagggaagttcaagaagattacactggactatactttaaaatgatcccaacctgtgtaagagttaacttcgcgcatgcaaacttaacttttatacaggttagggacgatgtattatttctaacgataataatctaaacaaagtaaaacatcaaggcggatcactccgccttttcgttttttggctcacccgcgacccgaatcattccgtcgcgagtgacaagccaagtgcccgcactttttctc

SEQ ID NO: 2226 - DNA, 260 bp, Artificial Sequence
  Description of Artificial Sequence: Synthetic polynucleotide
accgtgaagggcgtgaagcgcacgttcaagccggagtgcgtcgacatcgagtggctttgatcgccaattctggcatgactcaacagattccgagccccacgccgaacaggcactttgtcgcacactctggcacggagcagaacagtccgatacagttcttcttgtcggtaacgagccgacaccatcggataccgtgcggcacaagctgagcgggacgaacgagagtctgcgggccacgcgccccggctaagcggtggtct

SEQ ID NO: 2227 - DNA, 260 bp, Artificial Sequence
  Description of Artificial Sequence: Synthetic polynucleotide
gtattcgacccgttgatggtagagatcctgccgcgcaatggatttgtctgccggccctagctcatcgccaccgggcccacacaaagggcacaagggcgcgcagaaaatccagatccggccccggcgttgcgtcggcgaaggcttgctcgaagtactcctcggcgaccagcagtattccttcggcgtactcgcgggtaaacgcaatgctgtcgtaagtatccatcagcgcgcgaacaccgcgaaccatctcgggtgaacgc

SEQ ID NO: 2228 - DNA, 260 bp, Artificial Sequence
  Description of Artificial Sequence: Synthetic polynucleotide
gcacagcgccgatttcctgaaggtggacccggacaaccggttggtcgccgatgcgcttgaggccgactggaacgctcgcttgcgctcgctggccgaggcacagcaggcatacgaaaaggcgagcgtggccgacagcaatgtcgtcaccgatgccgagcgcgttgaattactggccctggcaacggacttcccccggttgtggcgtaatccgcgcacgcagatgaaagagaagaagcgcatgttgcggctgttgatcgagg

SEQ ID NO: 2229 - DNA, 260 bp, Artificial Sequence
  Description of Artificial Sequence: Synthetic polynucleotide
gaacaactggcacaagaaataaccccggaaactttgaaaaagaaggtggtcaatggataatcaatcaacacctatgtctcatataattgaaagtagcgacggctccctctcaataaagataccgttaacacctaaagtacgcagtggccgtaagattattaccctccctggcagtacagatagcgactaccgcccctgggatagccagcccacgccacttcaattagcgctagcgagggcttatgagtgggagcaaaaac

SEQ ID NO: 2230 - DNA, 260 bp, Artificial Sequence
  Description of Artificial Sequence: Synthetic polynucleotide
atgcgccagattgaatacttagaagggaggaagggagaatgcgtacggcacgtgcagtaagaatgatacctgcaacggcaaaacttcatgagcctgttgcaaataacgccatagggcagaaaagggtcgcggcctatgcgagggtttcaacagacaacgacgagcaactctcaagctatgaggcacaggtagattactatacaagacacatcaagtcgaatccagagtgggattttgttgaggtttatgcagacgagggc

SEQ ID NO: 2231 - DNA, 260 bp, Artificial Sequence
  Description of Artificial Sequence: Synthetic polynucleotide
aaagaacaagcacgattaagagcactagaacagcatcatggaggtggagaaaatgcctaaagtcacagtcataccatcaacaattaatcctattacacaaatgcctatccatgcgaatcatgttaagaaagtagccgcatacgctagggtttcaacaaacagcgatgaacagtacacgagttacgaggctcaggtgaatttctataaaaaatacattcaagaaaaacctgactgggagtataccgaagtttacgctgatg

SEQ ID NO: 2232 - DNA, 260 bp, Artificial Sequence
  Description of Artificial Sequence: Synthetic polynucleotide
agagaagcagaagcgttaagtagaaaagcagaggatagcgataaaaatgatgatagctgaactgttgctactgcaactggctctcttttgtgcataaaaattattcagaacatcatttaaaatactccagtaatttcccggcaaccctttccttcatttccttcggccagtcaggatcgaggaatgtttcatttttgataactttagatgagtccacagtttctttgattatcccgaaaatcgcatcaattagaaagcca

SEQ ID NO: 2233 - DNA, 260 bp, Artificial Sequence
  Description of Artificial Sequence: Synthetic polynucleotide
gtgcgccgctggcgtgtcaccgacgccgggccggtatgcccggatcaccccgacagctagtcgagtccgggttcgtcggtgagcccaccgaagacccatgccgggaaccctcgcttgagcgcataacgtcgagcgacctgtgaccagtcccgtgccgtaccggcctgcaccggcgcggcgggccaccagcggggcggattcagcagatcgagccgcgacggcgcgcagcgtcgcactgggggatctccgggcggcaccgg

SEQ ID NO: 2234 - DNA, 260 bp, Artificial Sequence
  Description of Artificial Sequence: Synthetic polynucleotide
cacctcgcggatggaactatgacgccggtgggcttaaccagtgaggggaggttggcatgagtcgcacggtcactgcgatacccgcaacaaagaaacccggaactgtcacaaccccgtccggggtaccggcacgcagaaaggtcgccgcctacgcgcgagtctctaccgagatggaagaacaaacctcatcatatgaggcgcaaatcgactactacaccacctacattcgctcccgtaatgattggcagttcgcgggcatg

SEQ ID NO: 2235 - DNA, 260 bp, Artificial Sequence
  Description of Artificial Sequence: Synthetic polynucleotide
ggccaaactgccgcgacagatttggttcatctggcgagccaagcgctgcaaacgttttgagcagcggcgtttctacaacgagacagcgactaccgttgacggagcccgtgccgtgtcttgaagagcacccggccgggtcaggcgggggcgcttccggcctgccattgcgtccagggcacactccagtcaccgttgttctgcaacgacagtggcgggcccccggtgttgcggacctcgacgatgtcgccgggttgggaaaa

SEQ ID NO: 2236 - DNA, 260 bp, Artificial Sequence
  Description of Artificial Sequence: Synthetic polynucleotide
atcgcccagggtctcggcgtgggcagggcaacgctctaccgggctctatctgttgattagaacaagtaaacgcgagagtcgctgtacaccggagaaatatcgtttccccatccagtcacaatgttctttgacagcgctggttgtttagaagctgatccgcagaatttaaaatcaaaagaatatgccatgcccacagtgtcggaacatcacgtggcggtcagggtacacacgatcggcaggtgacgtaataaggctatttt

SEQ ID NO: 2237 - protein, 713 aa, Artificial Sequence
  Description of Artificial Sequence: Synthetic polypeptide
MSREPAQLWWTAAEIAAAGLPDLPASRQGVEALARRANWRADPKHSRQRQGRGGGWQYHWSLFPLPAQTRLLQASAGAAPAAKPVLGRAEAWAWFETVPEAVKAEARRRLAVLDEVDTLTGLGTAKTLAVEEIARGHDMGARTIWDWFGMIDGVAPSDRLPYLAPRHRAAARKDTKVALDPEWFERLKGLYLRLGGPSFSQSWRDAERLAKANGWACLPERTARRRFDQEVPRVVQIHAREGVEGLERCYPPMIRSKALLHAMEAVNADCHRFDVFVLWPGSDRPERPQIVAYQDLYSGKILSWRIDHTPNEVAVMAAFGEMVETYGIPKHCTFDNGREFAAKWLSGGAKTRYRGKIRDDDPMGVLPLLNIKIHWAKPAHGQAKPIERAFRDFASDISKDIRFQGAYTGNRPDAKPEDYATRAIPLDDFVRVVGERIAEHNARVGRQSETAAGRSFDETFAESYAASTVVRATEEQRRLWLMGQKPVTLNRHHGRVRLFRNYYWSDWMVEYAGQKIVARFDVEDLHAGIHVYDLAGAYLGFAPCQQAEGFYNLTAAKDEARRRQAWKRVQKQALAAARRMTPAEIGRELDASAPAPAAPVEAKVVAMTPKGPRPAAAQVTRPAYRDPTTPEQQAEIVAFQEHHYADQARKAEAAEVETALDRFRWALEIERKAAAGEPVGEAEARRFERYRQTAEWRGMRRMHEHSGNAMFLS

SEQ ID NO: 2238 - protein, 704 aa, Artificial Sequence
  Description of Artificial Sequence: Synthetic polypeptide
MTLTPTKEWWTAAEIAAQALPDLANSRQGVEAQAKRDDWRAHPEHARKRAGRGGGWEYHWRLFPSRAQRELIGRATAPTSEGGSTGREDVWAWFDGLPEKTKDKARCNLRIVQEVETSCRAMTKNLAVGMVASQHGCSERTIWNLYRRIEGVDPADWLAYLAPKHRASSKKGVTARASAEFFDLLKGDYLRLGPHSFTSSYERAVKICKAKGLAYLTPRTARRWFDQNVPRVTQVFAREGEAGLAKCFPPQIRDRSTLTALEGVNADCHKIDVFVQWPGIEKPVRPQIVGFQDLYSNKILSWRVDLDPNKVAVMSAFGELVETWGIPHHCLFDNGREFANKWLTGGVPTRFRFKIRDDDALGVLPQMGIQIHWAQPAHGQAKPIERGFRDFADRIALDPRFAGAYVGKRPDAKPEDYGSRAIPLEDFLRVLDEGIRDHNARQGRLTDTAKGRSFDDTFAESYASAPIRKATPEQHRLWLMGQEVRKLHRTHGELTLHRNKYWADWMNEHAGEKVVARFDPENLHAGVYIYSLAGAFMGMSECSQKVGFFDLVGAKLHAKVKRQRRKAEKALLDAMRPVSVQDIAAELDRLPQPETPLVEAKVVEMAPARHRKPLVQRSLPVPDTAADERLKVFTAEFGKPKPAPEAKTETAEDRFRRALDIERRSEAGEPISEEDAEFLSRMQKLPKYRAQRLSYDSWGDQAIN

SEQ ID NO: 2239 - protein, 701 aa, Artificial Sequence
  Description of Artificial Sequence: Synthetic polypeptide
MAETPRQEWWSAAEIAAAGLPDVPGSKRKVNDMAAREGWKAQPGKSRRRNRTGGGWEYHWSLLPVRARLALSEPVEDEPAPKIGRDEAWAQFEAATGAAQKKARDRLAVLNQVEEIEVAGMTRSLAVTTVSERSGASAKSIWNWLDRVEGIAHADRLAYLVDRRGTRKKAAPAAPSADFCTLVKSDFLRQSQPSFTSCYDRAARIAKKEGLAVPPIHQVRRWYKASVSEPTEIYWRKGVEALRRFYPHQTRDKSAMVPLECVQGDYHKFDVFVRWPGEKDPVRVQAVVFSDVYSGKILAWRLDTTANSHTVQLAIGDLIERYGVPQQALLDNGREFAAKAITGGTPTRFRFKIDDEDIPGLLPLLGINVIWATPYSGQSKPIERAFRDLCDRVAKHPAFEGAYTGNRPDAKPENYGSRAIPLEEFRAVVAEEIEAHNARPARRSEVAFGRSFNDVFNEGYQRAAISRATDEQRRLWLLRVEGLRGDSKNGELKLHGSRYWAEWMYRIAGKKIAARFDQDDLHAGLHVYDLSGSYLGHAPCMEAAPFLSVEDARTHARKRNQFIRATKDLAKAERELDHHQIAARLRAAGKEVEDELPEAEVVRLVPAHPKAPKPARRGRQSTDQIENAARLDAQITRISERRAAPVEDDPRGRFDRAMTLEAMQAEGQPMTVEQATWLAEYQQSAEYRGFARMRRAFGEDE

SEQ ID NO: 2240 - protein, 695 aa, Artificial Sequence
  Description of Artificial Sequence: Synthetic polypeptide
MFSNSLEDFFGPEVDIYARVSSEDQQERETIENQIEYATKYCELNKLTIREWYLDDGITGTIPLRDRPAGAKLIKDAQEGKSKKILIFNMKRLGRVARVTLDAVYELEKHGAKIKSMTEPFDTSTPAGRFILTVLAGQAELDRDTMLETMWHGANRAARKGKWLGGIVPYGYKKNHDGFLEINCDPLPGKEDMSEASVIELLYHLCVNGKMSTIQIADYLNALGIPPSYVKDNRSIKRGRRKEKTAGVWRPARVGNMIKNSTYRGIHVYGKRSNKDRELIERKVPAIISEEMWHQAQIILKANQIEAVKNTKRQYLLRGLIKCGCCGLNYHGTAYRSSPFYVCNGKTAYAGPLMGKCKSRNIPAPWVENLVWEQCVNFINNPGDTVKELVNVDEKVLDHTAAYIDEKELVQKSLLNKDDERQSILELYRKKMISSNDVEIQLTEITNEKKELEDRLRELNILIEGNARKEKRTDDVFQILDGLREVIKEELPFETKRAIVKALVKKIIVHTHFEDGVKRFHNASVHAEFSFDGIKVINGTPVRENNNLDTIIEREFSFEGNYNRYLLLDKTTGQRLRRCRHLKKMTIEELSNSIGISSTTILMLEKHNNKASLRTLKLLSSVLEVPISYLGMFEKMPDSTFGDKVRKARYYHGLTKEELAAQIKVDKKTIQNWESNKCVPRDMKKLNQIIKILHM

SEQ ID NO: 2241 - protein, 675 aa, Artificial Sequence
  Description of Artificial Sequence: Synthetic polypeptide
MSDKKQDIYAIYIRVSTERQVEHGDSIEMQEALGMQIIKENNGIHYRTYIEPAVSASKTNLKNREVLMECLNDAKNGLFNKLIVYKRDRLARKLEDAMAIWDILKKANCELIFSATDEMQAMMNDPYGKMLEAIKASIAEIESATISVRVSDTLKNKAKKGEFTGGNLPYGYILKDKKIVLIPEEVKIIKEIEDLYLAGYGLYSIAKWLNGEKVSNLGYRPEGRAYRRKQHKNSSEYWTRDVIHTILFNPFYTGIIEYSTSGDKRSVNDDSLIIRAKGSHEPCRTLERHEQILREKKRRESEISEPRRYTTSFLLTGLLYCSECGNKFYGRNSTQNKKKYSYYVCGGKSTIKHIGKEPCPSKQFKKEVLEEFILQKIIEYISSVNLDSEIKKIQESLNESDLKLKTALEEINKKIERLNKDYTAIRRLLLDLDENDENYELLKESYQNDQAEILKKLNEAKKAKQELENQLNIQSDQENIIQSIIEEIRDFSKNIHYVPYHMKKVMIDKIIEKIEINKDGDVKLYFSIPLSPKEEQENKDIERKISFISFGGVGDTTTTKTIKIGIHLDHHKYNFFEWIQTISNKIKSSFINWIKLHVDIKSARQMHRDTGIAETTCREIINKERIPMPKTIKRIVEAYHLNLKSFIDFMGISISEESLFHVIETTISGRRVKAS

SEQ ID NO: 2242 - protein, 673 aa, Artificial Sequence
  Description of Artificial Sequence: Synthetic polypeptide
MSNTLLPGQRLRRRIRVAIYRRVSTNKQVDGFGLDAQDELCRRWLDLMIGVGNYIVVDVYTDGGVSGKLAEREDLDRMNADIAAGRIDLVIFGKLDRIGRTMKNIHRWVYDTQDIEVEKGRKVRIVTADNRIDSEGEMFEVTLALLAYMAQMEHSLILERTMSGRIQKVMAGGWPHGGIPYGYMIDPETGDVVVNPLEAVVIEKAIEFLVDSPEYLTRGEVAKRLNALGYRTRKGYLWDGANLAQRLKKALCGFSEFTFAAGTDEEQVHVLTLPEIVPGERALAATVALERSAKTKSPSVDYPLSKRLISLCGAGMVGGIDKRSGTRKYRCQKTREGAEYEHECQSLYADDVEAAVMAEVTGLVVDRDRLHELIKEALGTTPQRLESYRRRLTEIDETLAKKRKTRKKAIARLVAAVEVDDDEDDDFADEMREEIEELKARYKEEEADLLQERERVESWIADIEGEEERALQVLAAADKLRTKVGKLSKREQADLIEMLDIQVQIEGVAKVHRRGNVDPLSKWHWETGAEVPAELTDEMWAKVSSIISNTQKWKDIRGAFDVTLEKIRTGRVWTDFLKDERLGGRGYATLMRRVRHWDETGEYQQALKVLEGYRKVPAAPQFSLPPMRVTGAVARAPKGITAGQTGDVANGELGDVDGRGSRMQIACVASLTV

SEQ ID NO: 2243 - protein, 670 aa, Artificial Sequence
  Description of Artificial Sequence: Synthetic polypeptide
MVKRTLPRQRMKQATVRVAIYLRVSTAQQLEGYGLKVQEDQCRAWIAYALRGVNYTIVEVYVDGGVSGKLASREELDRMTADAMAERLDLIVFGKLDRIGRTMKNIHRWVYDVTDKGVRVATADGRIDSEDEMFGIQLSLLAYMAEVEHALILERTMGGRMQKVAVGGWPLGEPPFGFMLDSNGNPALNAPEIKQIEEFADFMIDSPDPVTREDAARHLNALGYRTRRGKEWDGGNLVGRVMAALKGYVEFAFAGENEDGEEITTSFRIDLPKALPDDRAEALKAALARGSRVKGRHSKYLLSNRLISVCGAHRTGATTPEHGRFYRCMAGRQGNPINERHEDCWEIPVEEVDAAVWDEVKDLLSDKDKLRKLVEESLGSVPDRAESYRRRLTELDAQIEKKRSGRKRKVALLLASIDDDSENGEEDAKLVEELKAELKGQEADLVEERERVAEWLYEIEGQEGRAKDMLAMIDKVETRLDDFTFDQKLDLLDLLDVRVQITGKGVPRHKGLVDPIGEWHRETGLTIPIEITDEQWVKVQPILSGNRQWRDVRGGFEVMLDKLRTGRAWNEYSGCEAIGGRSYGALYRRVTHWFGSGEYERALEELTPYVGVPVPPLYVLPPMEVTGSADPKYTVERAAQECPDPNCNDAKTGTSSSRILFAQMDFNPTR

SEQ ID NO: 2244 - protein, 670 aa, Artificial Sequence
  Description of Artificial Sequence: Synthetic polypeptide
MVKRTLPRQRMKQATVRVAIYLRVSTAQQLEGYGLKVQEDQCRAWIAYALRGVNYTIVEVYVDGGVSGKLASREELDRMTADAMAERLDLIVFGKLDRIGRTMKNIHRWVYDVTDKGVRVATADGRIDSEDEMFGIQLSLLAYMAEVEHALILERTMGGRMQKVAVGGWPLGEPPFGFMLDSNGNPALNAPEIKQIEEFADFMIDSPDPVTREDAARHLNALGYRTRRGKEWDGGNLVGRVMAALKGYVEFAFAGENEDGEEITTSFRIDLPKALPDDRAEALKAALARGSRVKGRHSKYLLSNRLISVCGAHRTGATTPEHGRFYRCMAGRQGNPINERHEDCWEIPVEEVDAAVWDEVKDLLSDKDKLRKLVEESLGSVPDRADSYRRRLAELDAQIAKKRSGRKRKVALLLASIDDDSENGEEDAKLVEELKAELKGQEADLVEERERVAEWLYEIEGQEGRAKDMLAMIDKVETRLDDFTFDQKLDLLDLLDVRVQITGKGVPRHKGLVDPIGEWHRETGLTIPIEITDEQWVKVQPILSGNRQWRDVRGGFEVMLDKLRTGRAWNEYSGCEAIGGRSYGALYRRVTHWFGSGEYERALEELTPYVGVPVPPLYVLPPMEVTGSADPKYTVERAAQECPDPNCNDAKTGTSSSRILFAQMDFNPTR

SEQ ID NO: 2245 - protein, 669 aa, Artificial Sequence
  Description of Artificial Sequence: Synthetic polypeptide
MRTTTLPRKRKMLRVAIYLRVSTSKQLDGWGLDVQDERCRAWVDYQLKGTPHAIVDVYCDGGVSGKLAHRDDLDRLTSDIEAGLIDVVVFAKLDRIGRTMKNIHRWVYDVTDFGVRVATADGRIDSDDQMFGIQLSLLAYMAEVEHALILERTMGGRVKKISGGGWASGTPPYGYMLDEDGEPVVNPAELEQIMKFAELAVDQGASRGEAAKGLNEAGYRTRTGKLWEGNNLILRMRLAIRGYVDFTFSGVNEDGEEITTSYRLELPPLFEDESRRKALETVLLEDMKGEARVSYGEHMLTGHLVSQCGHPRYGAARREYDDVVYRCKNQATIAEGHTCKQIPGEETEKVVWDEVAKKLADPESIKGLVDDWLGTIPERAESYRSRMQEIDDKLNKLRNTRRKKIAMLVASLDEDDEEDQKLIAELKEEIASKEKDLRQEQERIAEWLEEAEHKEERAESMRTLIDRIGTNVHNISQVDKKRLLELLRVRVQIVGESVSGQKGGTKDPMLEWHREKKIKIPLSISDEQWAQVEGILAGGRKPKPEDRPCFEMLLEKLREIKGWHDYDHDERMGGKGWGFFYRLARRWFVEGMYAKALEVLTPYEGVDAPDGYTLPPMKIYGVIDDSAEDVVVTSESAVKAEVGGRTPSTKGIRGNASGFEFEIGSTKAS

SEQ ID NO: 2246 - protein, 669 aa, Artificial Sequence
  Description of Artificial Sequence: Synthetic polypeptide
MKRTLPRQRMKQATVRVAIYLRVSTAQQLEGYGLKVQEDQCRAWIAYALRGVNYTIVEVYVDGGVSGKLASREELDRMTADAMAERLDLIVFGKLDRIGRTMKNIHRWVYDVTDKGVRVATADGRIDSEDEMFGIQLSLLAYMAEVEHALILERTMGGRMQKVAVGGWPLGEPPFGFMLDSNGNPALNAPEIKQIEEFADFMIDSPDPVTREDAARHLNALGYRTRRGKEWDGGNLVGRVMAALKGYVEFAFAGENEDGEEITTSFRIDLPKALPDDRAEALKAALARGSRVKGRHSKYLLSNRLISVCGAHRTGATTPEHGRFYRCMAGRQGNPINERHEGCWEIPVEEVDAAVWDEVKDLLSDKDKLRKLVEESLGSVPDRADSYRRRLAELDAQIAKKRSGRKRKVALLLASIDDDSENGEEDAKLVEELKAELKGQEADLVEERERVAEWLYEIEGQEGRAKDMLAMIDKVETRLDDFTFDQKLDLLDLLDVRVQITGKGVPRHKGLVDPIGEWHRESGLTIPIEITDEQWVKVQPILSGNRQWRDVRGGFEVMLDKLRTGRAWNEYSGCEAIGGRSYGALYRRVTHWFGSGEYERALEELTPYVGVPVPPLYVLPPMEVTGSADPKYTVERAAQECPDPNCNDAKTGTSSSRILFAQMDFNPTR

SEQ ID NO: 2247 - protein, 668 aa, Artificial Sequence
  Description of Artificial Sequence: Synthetic polypeptide
MRTKTLPRKTKTLRVAIYLRVSTSKQLDGYGLDVQDERCRAWVDYQLKGTPHTIVDVYCDGGVSGKLAHREDLDRLTADIEAGLIDVVVFAKLDRIGRTMRNIHRWVYDVTDHGVRIATADGRIDSDDQMFGIQLSLLAYMAEVEHALILERTMGGRIQKIAGGGWASGTPPYGYMLDEEGEPVINPAELEVILKAAEFLVDQRMSRGQAAAELNELQYRTRTGKLWEGNNLVLRLRLAVRGYVDFSFSGMNEDGEEITTSYRVELPPLFEDESRRKALEEALEDMKGNPRTSYSNHLLSGHLYSLCGSSRYGVSRADQGDFIYRCSNHATAAEGHTCKQIDGKETETVVWDEVEKLLTDPEAIKGVIDDWLGTIPDRADSYRARLKEIDDKLHRLRNTRRKKIAMLVASLDEDDEEDQKLIAELKEEIAGKEKELREEQERITEWLEEAEHKEERADNLRSIIDRVGVNMQGLTKADKKGVLELLRIRVDIVGDSVSGQKGGTKDPMLEWHREHGISIPLAVSDEQWARIESILAGGRKPKLEDRPCFEMLLEKLREKKGWHDYDHDERMGGKGWGFLYRLGRRWFTEGMYAAALEAMGPYEGVPAPDGYTLPPMKIYGVIDDSTEDVVHTSGDAVKAEAGGRTPSTKGIRATTSGFEFEIASTKAS

SEQ ID NO: 2248 - protein, 663 aa, Artificial Sequence
  Description of Artificial Sequence: Synthetic polypeptide
MELWVSPKECANLPGLPKTSAGVIYVAKKQGWQNRTRAGVKGGKAIEYNANSLPVEAKAALLLRQGEIETSLGYFEIARPTLEAHDYDREALWSKWDNASDSQRRLAEKWLPAVQAADEMLNQGISTKTAFATVAGHYQVSASTLRDKYYQVQKFAKPDWAAALVDGRGASRRNVHKSEFDEDAWQFLIADYLRPEKPAFRKCYERLELAAREHGWSIPSRATAFRRIQQLDEAMVVACREGEHALMHLIPAQQRTVEHLDAMQWINGDGYLHNVFVRWFNGDVIRPKTWFWQDVKTRKILGWRCDVSENIDSIRLSFMDVVTRYGIPEDFHITIDNTRGAANKWLTGGAPNRYRFKVKEDDPKGLFLLMGAKMHWTSVVAGKGWGQAKPVERAFGVGGLEEYVDKHPALAGAYTGPNPQAKPDNYGDRAVDAELFLKTLAEGVAMFNARTGRETEMCGGKLSFDDVFEREYARTIVRKPTEEQKRMLLLPAEAVNVSRKGEFTLKVGGSLKGAKNVYYNMALMNAGVKKVVVRFDPQQLHSTVYCYTLDGRFICEAECLAPVAFNDAAAGREYRRRQKQLKSATKAAIKAQKQMDALEVAELLPQIAEPAAPESRIVGIFRPSGNTERVKNQERDDEYETERDEYLNHSLDILEQNRRKKAI

SEQ ID NO: 2249 - protein, 663 aa, Artificial Sequence
  Description of Artificial Sequence: Synthetic polypeptide
MTNWFTTKELVGLPGLPEHSQNISRMAKKNGWEFRQKEGVKGVAYEFSMNSLPIQTQTALMKKQGKVQVGDQVLELPKKKSEQSYCREALWARWSKNNNAAKEKAQQALRTVQAVFALKNNGIKLMDAYQSVSEEYGVALSTLRRSCAKVKGIDECDWAPALLPKNFESSQTQKPNQFAYVTPEAWEFFKADYLSLEQPAMSVCYERLIDTAPSKGWKVPSLKSLGRRLEHEVPVQQRIMLREGEHALHQMFPPQERTVEGLHALEWINGDGYQHNVFVKWFNGEILRPKTWFWQDIYSRKIIGWRCDISENTDSIRLSLMDVCEKFGVPKELTLDNTRAAANKWMTGGVPNRYRFKVKADDPLGIIPMMNIKLHWSSVILGKGHGQAKPIERAFGVGGLEEYIDKHPLCRGAYTGPNPMAKPDNYGSKAIDAEDFLQAIAKGVEMYNAKENRHTEVCKGFMSFNQAFNASYETAAIRKATTDQLQMMMLQAEAVRVSKHGTISLDAGGSLKGRKNRYYSELMMNYVGQKLVARFDPLKLHESIEVYTLNGVRICTAECLDKTGFGDTQAAREHKRKRTQFTKANKIAAQAQTDIDALEVAAMMKPLEEEVLPETKVVEPFRPVSIGNTAAKAIALEDEEEDYEQNFSQSVSNLFEQKFKNKL

SEQ ID NO: 2250 - protein, 662 aa, Artificial Sequence
  Description of Artificial Sequence: Synthetic polypeptide
MKEWYTAKELLGLAGLPKQATNITRKAQREGWEFRQVAGTKGVSFEFNIKSFPVALRAEILLQQGRIETSQGYFEIARPTLEAHDYDREALWSKWDNASDSQRRLAEKWLPAVQAADEMLNQGISTKTAFATVAGHYQVSASTLRDKYYQVQKFAKPDWAAALVDGRGASRRNVHKSEFDEDAWQFLIADYLRPEKPAFRKCYERLELAAREHGWSIPSRATAFRRIQQLDEAMVVACREGEHALMHLIPAQQRTVEHLDAMQWINGDGYLHNVFVRWFNGDVIRPKTWFWQDVKTRKILGWRCDVSENIDSIRLSFMDVVTRYGIPEDFHITIDNTRGAANKWLTGGAPNRYRFKVKEDDPKGLFLLMGAKMHWTSVVAGKGWGQAKPVERAFGVGGLEEYVDKHPALAGAYTGPNPQAKPDNYGDRAVDAELFLKTLAEGVAMFNARTGRETEMCGGKLSFDDVFEREYARTIVRKPTEEQKRMLLLPAEAVNVSRKGEFALKVGGSLKGAKNVYYNMALMNAGVKKVVVRFDPQQLHSTVYCYTLDGRFICEAECLAPVAFNDAAAGREYRRRQKQLKSATKAAIKAQKQMDALEVAELLPQIAEPEAPESRIVGIFRPSGNTERVKNQERDDEYETERDEYLNHSLDILEQNRRKKAI

SEQ ID NO: 2251 - protein, 662 aa, Artificial Sequence
  Description of Artificial Sequence: Synthetic polypeptide
MKEWYTAKELLGFAGLPKQATNITRKAQREGWVFRQVTGTKGVSFEFNIKSFPVALRAEILLQQGGIETSQGRFEIARPTLEAYDYDREALWSKWDNASDSQRRLAEKWLPAVQAADEMLNQGISTKTAFATVAGHYQVSASTLRDKYYQVQKFAKPDWAAALVDGRGASRRNVHKSEFDEDAWQFLIADYLRPEKPAFRKCYERLELAAREHGWSIPSRATAFRRIQQLDEAMVVACREGEHALMHLIPAQQRTVEHLDAMQWINGDGYLHNVFVRWFNGDVIRPKTWFWQDVKTRKILGWRCDVSENIDSIRLSFMDVVTRYGIPEDFHITIDNTRGAANKWLTGGAPNRYRFKVKEDDPKGLFLLMGAKMHWTSVVAGKGWGQAKPVERAFGVGGLEEYVDKHPALAGAYTGPNPQAKPDNYGDRAVDAELFLKTLAEGVAMFNARTGRETEMCGGKLSFDDVFEREYARTIVRKPTEEQKRMLLLPAEAVNVSRKGEFTLKVGGSLKGAKNVYYNMALMNAGVKKVVVRFDPQQLHSTVYCYTLDGRFICEAECLAPVAFNDAAAGREYRRRQKQLKSATKAAIKAQKQMDALEVAELLPQIAESEAPESRIVGIFRPSGNTERVKNQERDDEYETERDEYLNHSLDILEQNRRKKVI

SEQ ID NO: 2252 - protein, 662 aa, Artificial Sequence
  Description of Artificial Sequence: Synthetic polypeptide
MSNLKIKTHYSAMEIASFKLNSAPHAHKNVQEKAKRECWTARKREGRGGGLEYAFESLPQEIQAEILLKHTESKSFTEPTRGVAHKNYLPEVIWAPFDKASEKQRAEAQQKLVLLHKIDDLTRNNIKLMDALEMVATEFNVAKGSLKRWYYKVRTFERSDWLPLLLDKHGTNRKSAEAEFTPEAWESFKADYFRNERPQFGSCYERLKRAAREQGWVIPSASSVKRKIEREIPKVQQVFLRNGEHALSQYYPTMQRSVADLEVLEWINGDGYQHNVFVQWHNGDIVRPKTWIWQDIRTRKILAYRVDLSENSDTIRLSLMDLIWKYGIPKKCTIDNTRAAANKWMTGGVKNRYRFKVKEDDVKGIIPLLGIELFWTSIQFGKGHGQAKPVERAFSHGGLGELIDKHPKLAGFYAGENVYNKPDNYNGGKEGASYEDFILALEDGIRTFNEREQRETEICQGVYSFNQVFERDYAKARVRKASQEQMRILMLMSEATTLKKDGTFELDVGGKVHNRRNRYLCTDLIGSHHKKVIVKFDPQDLHSKVWVYSTEMIYLGEAECTERVAFGDKAAGREHDKARKQWVKAQKQAAKAQQTMNAQEVARFLPEPTFEEEIQQPQIIELFHTQGNAVKKTEVVLDDEENTFEQGWRKGLEMIKQEKGIK

SEQ ID NO: 2253 - protein, 658 aa, Artificial Sequence
  Description of Artificial Sequence: Synthetic polypeptide
MGAKTLARKRKTLRVAIYLRVSTSKQLDGWGLDVQDERCRDWINYQLKGTPHTIVDVYCDGGVSGKLAHRDDLDRLTADIEAGLIDVVVFAKLDRIGRTMKNIHRWVYDVTDFGVRVATADGRIDSDDQMFGIQLSLLAYMAEVEHALILERTMGGRVKKVSGGGWASGTPPYGYMLDDEGEPIINPDELEVILKAAELLIDQKMSRGQAAEALNELKYRTRTGKLWEGNNLVLRLRLAVRGYVDFSFSGTNEDGEEITTSYRLELPELLPEDRRKALEAALEDMKGTPRTSYSNHLLSGHLISVCGHSRYGSARHEYGDVVYRCSNSATAAEGHTCKQIAGPETEKVVWDEVAKLLADPDAIKGLIDEWLGSIPERAESYRARTQEIDAKLGKLRTTRRKKIAMLVASLDEDDESDMNLISELKEEIAAKEKELREEQERIAEWLEEAEHKEGKASDMHALIDRIGTNATDLDRPAKKSILELLQVRVEIVGEGKSGRAGGSKDPILEWHRENGITIPLTVSDEQWSRVERILAGGRKPKPDDRPCFEMLLEKLRHDKGWHDYDRDERMGGKGWGFFYRLGRRWFAEGMYAKALEELAPYDGVEAPSGYTLPPMKIYGAIDDSTEDVVKTEAGGRTASTKGIRGNASAFEFEIGSTR

SEQ ID NO: 2254 - protein, 656 aa, Artificial Sequence
  Description of Artificial Sequence: Synthetic polypeptide
MSQDWFTAKELAGLSGMPGTHSAVVRRAKRDGWKSRQRRAQGGGREYAFSSLPLETQAAVLKKFGSSAKAVTKIKPEKATKTTGREELWDLYEAAPNTMKEAAQHRLVVIESIERLQDNGASKTQAIHQAMITYRESRATIYRWLQIANSVEPEDRLAALAPSYKPGRPRAACDERAWDHFKALYLTPEQRTVAHCYELTEQAAKAEGWDWPPLRTINRRVKDIPRHIRVLEREGENALLRLYPSMKRTVRDIHALFWINGDGYQHNVFVRMPNGEIGRPKTWFWQDIYSRQIVGFRTDQSENTDMIRLALGDVIEQYGIPEHVTIDNTRAAANKWLTGGVSNRYRFKVKETDPLGLLPQLGIKVHWTSVVAGKGWGQAKPVERAFGVGGLGDYVDKHPKFEGAYTGPNVTAKPDNYGEKAVDWDVFVKTLRQAIAQWNEKEKRRTEICAGVHSFKQAFDDSYQRNAEHIRRATAAQRRLWLMQAESVLVQRDASVSLTIGNGPNGKNRYGADFLVDYAGERVVVRFDPDNLHNAVHLYRNDGRYLGEAECLHAAGFGDTSAGREWNRENKRRSKASKQAAKAEKRMSVLEATEYLPEPEDSVPEDESNVRRGDFGRVQKAVAGSDIADQPYQSPADKYGFNDAMERHLKKFKGEA

SEQ ID NO: 2255 - protein, 655 aa, Artificial Sequence
  Description of Artificial Sequence: Synthetic polypeptide
MKTVAIYSRKSRFTGKGDSIENQIEMCKEHIKKFVSPNVEFLIYEDEGFSGGNTNRPAFQRLINDIKYGNINLLICYRLDRISRNVADFSSVLDVLQEYKVDFISIKEQFDTSSPMGRAMIYIASVFAQLERETIAERIKDNMLEMAKKGKWTGGKLPLGFTSKKIAYIDEEGKKRFKVTLEHDSKDLEFVKFLYEKYLELGSLHKLETYTHENNIRSASGKIFEKSTLKIILQNPIYVKADENVFNYFENKGWSVYGEPDGLHSLLSYNKTETAKKDGKLTKRNKDESESLVAVSDVKGFIDSSLWLKVQYQFKKNKNTFPRLGKTHNALLVGKLFCGNCGTRMIIQHGRTSTKTGIKTFYYVCSLKKTSKKKLCSAHNVKTDFLENLVLDSLEKLYYKKDFINDSLKINLKENKDNIKEINTTKKLIELNKNKINSLIEKLSLDFDNILSDILIPQIKKIKIENDVLESKLEELKLKKQESEMNRIEIDLITSLLNKCKNIKELTRTEQKQIIDCLVDSIYYYSNDNGNDKIKIKFINDIDSINTLLSDEEKRQFEKLSFYSHSMSSMNKKTTLNNILSKKEMYLLDMLPNKTIGDKIKKLRISTGLNYNDFARKVKVGTMTIYRWETGDRTPNKIYLKQLIENFNLDKDYFK

SEQ ID NO: 2256 - protein, 655 aa, Artificial Sequence
  Description of Artificial Sequence: Synthetic polypeptide
MGFSGLPTTERGIRKLVENLAITSGVERRKRQGTKAFEYPISILSSAHQVLLLKKQGKVQVGDQVLELPKKKSEQSYCREALWARWSKNNNAAKEKAQQALRTVQAVFALKNNGIKLMDAYQSVSEEYGVALSTLRRSCAKVKGIDECDWAPALLPKNFESSQTQKPNQFAYITPEAWEFFKADYLSLEQPAMSVCYERLIDTAPSKGWKVPSLKSLGRRLEHEVPVQQRIMLREGEHALHQMFPPQERTVEGLHALEWINGDGYQHNVFVKWFNGEILRPKTWFWQDIYSRKIVGWRCDISENTDSIRLSLMDVCEKFGVPKELTLDNTRAAANKWMTGGVPNRYRFKVKADDPLGIIPMMNIKLHWSSVILGKGHGQAKPIERAFGVGGLEEYIDKHPLCRGAYTGPNPMAKPDNYGSKAIDAEDFLQAIAKGVEMYNAKENRNTEVCKGFMSFNQAFNASYETAAIRKATTDQLQMMMLQAEAVRVSKHGTISLDAGGSLKGRKNRYYSESMMNHVGQKLVARFDPLKLHESIEVYTLNGVRICTAECLDKTGFGDTQAAREHKRKRTQFTKANKIAAQAQTEMDALEVAAMMKPLEEEVLPESKVVEPFRPVSIGNTAAKAIALEDEDEDYEQNFSQSVSNLFEQKFKNKL

SEQ ID NO: 2257 - protein, 655 aa, Artificial Sequence
  Description of Artificial Sequence: Synthetic polypeptide
MGFSGLPTTERGIRKLVENLAITSGVERRKRQGTKAFEYPISILSSAHQVLLLKKQGKVQVGDQVLELPKKKSEQSYCREALWARWSKNNNAAKEKAQQALRTVQAVFALKNNGIKLMDAYQSVSEEYGVALSTLRRSCAKVKGIDECDWAPALLPKNFESSQTQKPNQFAYITPEAWEFFKADYLSLEQPAMSVCYERLIDTAPSKGWKVPSLKSLGRRLEHEVPVQQRIMLREGEHALHQMFPPQERTVEGLHALEWINGDGYQHNVFVKWFNGEILRPKTWFWQDIYSRKIVGWRCDISENTDSIRLSLMDVCEKFGVPKELTLDNTRAAANKWMTGGVPNRYRFKVKADDPLGIIPMMNIKLHWSSVILGKGHGQAKPIERAFGVGGLEEYIDKHPLCRGAYTGPNPMAKPDNYGSKAIDAEDFLQAIAKGVEMYNAKENRNTEVCKGFMSFNQAFNASYETAAIRKATTDQLQMMMLQAEAVRVSKHGTISLDAGGSLKGRKNRYYSESMMNHVGQKLVARFDPLKLHESIEVYTLNGVRICTAECLDQTGFGDTQAAREHKRKRTQFTKANKIAAQAQTEMDALEVAAMMKPLEEEVLPESKVVEPFRPVSIGNTAAKAIALEDEDEDYEQNFSQSVSNLFEQKFKNKL

SEQ ID NO: 2258 - protein, 637 aa, Artificial Sequence
  Description of Artificial Sequence: Synthetic polypeptide
MDKDWNGLADLIANLITKYAGVLDLDNLPDPMPVDNNIENKNIFDIAKTQIDKNKSDIIYLIYKSKLFWKYKDIEKYIEVNAMSKEKIKVYLYTRVSTSIQIDGYSLEAQKTRMKAFALYNDYEIVGEYEDAGKSGKSIEGRVQFTRMMEDIKSGKDGVSFVLVFKLSRFARNAADVLSTLQTMQDFGVNLICVEDGIDSSKDAGKLMISVLSAVAEIERENIRVQTMEGRIQKAREGKWNGGFAPYGYQLVDGKLFINEEEAVAIRTIFEQYVNTTIGANGLSKYLENHGIRKIPRQNGKNPLFDAGLIRKILKNPVYKGKIAFGRRTLEKVHGTRNEYKQVEQDEYLIAEGIHEAIISDELWQAAQVKLKSQAKKYEHVNKGKDVRTHLLSGIVKCPICGVGMFGNKCIKKKKDGTKYKDFYYYGCKHRQMIRGHKCTFSKQIREELLDDAVAELIIKIVSNPKFASIMQEKINMKVDTSEIEKEIDNYQKELRKSHSIKFKLIEEIDNLNVDDKHYKRRKQDLDDRLYRMYDKIEELESLLIDAKAKKQTIEAEKLTGDNIYKVLIYFDKLYNVMNDVERRQLITALISEIQIYEEKQPNGQWLKSITFKLPVIDEDLNISLDNDKQVECVVLM

SEQ ID NO: 2259 - protein, 626 aa, Artificial Sequence
  Description of Artificial Sequence: Synthetic polypeptide
MSVKVEGMVILAGGYDRQSAERENSSTASPATQRAANRGKAEALAKEYARDGVEVKWLGHFSEAPGTSAFTGVDRPEFNRILDMCRNREMNMIIVHYISRLSREEPLDIIPVVTELLRLGVTIVSVNEGTFRPGEMMDLIHLIMRLQASHDESKNKSVAVSNAKELAKRLGGHTGSTPYGFDTVEEMVPNPEDGGKLVAIRRLVPSAHTWEGAHGSEGAVIRWAWQEIKTHRDTPFKGGGAGSFHPGSLNGLCERLYRDKVPTRGTLVGKKRAGSDWDPGVLKRVLSDPRIAGYQADIAYKVRADGSRGGFSHYKIRRDPVTMEPLTLPGFEPYIPPAEWWELQEWLQGRGRGKGQYRGQSLLSAMDVLYCYGSGQLDPETGYSNGSTMAGNVREGDQAHKSSYACKCPRRVHDGSSCSITMHNLDPYIVGAIFARITAFDPADPDDLEGDTAALMYEAARRWGATHERPELKGQRSELMAQRADAVKALEELYEDKRNGGYRSAMGRRAFLEEEAALTLRMEGAEERLRQLDAADSPVLPIGEWLGDRGSDPTGPGSWWALAPLEDRRAFVRLFVDRIEVIKLPKGVQRPGRVPPIADRVRIHWAKPKVEEETEPETLNGFTAAA

SEQ ID NO: 2260 - protein, 612 aa, Artificial Sequence
  Description of Artificial Sequence: Synthetic polypeptide
MTIHAAGYDRQSAERDSGSAASPATQRAANYGKAESLAREVARDGVEFKWLGHYSEAPGTSAFSGVDRPEWNRLVADCRAGKVNMIIVHYISRLTRRDPLEAIPVLTELLHLGVVIVSVNEGQFRAGNLMDLIHLIMRLDASHQESKNKSIAVKDAKELARALGGHVGFIPYGFDTEARMVPNPNDNGKPVQIQVLKHGAQKWDDAPHGSEPEVIRWLWREIKAHRDTPFKGGGAGSFHPGSLNGLVTRLWQNGVPTRGKTTGKKRADSDWDPSVLKRILRDPRIAGFQAEIVYRLKPDGTRGGFSHYRIKRDPVTMRPLELECGPIIPPAEWWELQAWLDGRGRGKGQYRGQSLLSAMDLLYCHGSGATDPETGYGDGSTMSGNLREGEAAKRATYSCKCPRRIHNGSSCSITMHNLDPYIAGRIMARIATVDPGDPDDADTVALLHEATRRWGMLNERPEKAGQRAELLAERADAVRALEELYEDRRAGGYKGAMGRKAFLQEEAAHTLRMEGAEERLRELDAAANPTLPVHEWLGEPGTDPLGPDSWWAKSELADKRAFIKLFIDRIEVIKTPKGAQRPGRVPDIASRVIIHWAKPSEDAQEEPETLAA

SEQ ID NO: 2261 - protein, 605 aa, Artificial Sequence
  Description of Artificial Sequence: Synthetic polypeptide
MDTYAGAYDRQSRERENSSAASPATQRSANEDKAADLQREVERDGGRFRFVGHFSEAPGTSAFGTAERPEFERILNECRAGRLNMIIVYDVSRFSRLKVMDAIPIVSELLALGVTIVSTQEGVFRQGNVMDLIHLIMRLDASHKESSLKSAKILDTKNLQRELGGYVGGKAPYGFELVSETKEITRNGRMVNVVINKLAHSTTPLTGPFEFEPDVIRWWWREIKTHKHLPFKPGSQAAIHPGSITGLCKRMDADAVPTRGETIGKKTASSAWDPATVMRILRDPRIAGFAAEVIYKKKPDGTPTTKIEGYRIQRDPITLRPVELDCGPIIEPAEWYELQAWLDGRGRGKGLSRGQAILSAMDKLYCECGAVMTSKRGEESIKDSYRCRRRKVVDPSAPGQHEGTCNVSMAALDKFVAERIFNKIRHAEGDEETLALLWEAARRFGKLTEAPEKSGERANLVAERADALNALEELYEDRAAGAYDGPVGRKHFRKQQAALTLRQQGAEERLAELEAAEAPKLPLDQWFPEDADADPTGPKSWWGRASVDDKRVFVGLFVDKIVVTKSTTGRGQGTPIEKRASITWAKPPTDDDEDDAQDGTEDVAA

SEQ ID NO: 2262 - protein, 603 aa, Artificial Sequence
  Description of Artificial Sequence: Synthetic polypeptide
MARKKNIAAGQNAVIYARYSSHNQREVSIEQQVRECMKHAAELGLHVVGTYEDRAISGKTDKRPNFQRMMRDAEKGKFQAVVAWKSNRIGRNMLQAMVNEAKLEDCGVKVFYAEEDFDDTAAGRFALRNMMNVNQFYSENMAEDITRGLYDNASKCMANGRQPLGYKRGEDGRVVLDDANAAVVREIFTRVAAGDLFVDIARDLNAQGIKTSKGANWNKGSFQSICQNERYRGIYIYGDVRVVDGIPRIVSDDLWYRVQEAMRMKKNPVGTRHRVGAEDYLLTGKLRCGHCGSYMTGVSGTSRNGELHYYYTCQKRRTEHACDKKNIRRDVIEPAVAQAIKMYCLTDDVIEWMADRTVEYWEKHDNDLQIEALEQQLEENKKATSNMLKAIEMGIITEATRTRMVELETEQSRLSVQLNTAKEDVVKIDREQIISYLELLQQGDIHDRDFQMELFKNFLVAVYVYDDNRMKLVFSCMGDQNSVEISLETGEDPPDGGLSPDAKMFVLTPDSSTKKALYFVESMVLFFFSAAKNGGCTALSASFSDVLQAIQCSPRVIGASAGQKVPVQLTISSICPNTSSIWRTSVNWVRARSRLWSGRAVWK

SEQ ID NO: 2263 - protein, 594 aa, Artificial Sequence
  Description of Artificial Sequence: Synthetic polypeptide
MSPFIAPDVPEHLLDTVRVFLYARQSKGRSDGSDVSTEAQLAAGRALVASRNAQGGARWVVAGEFVDVGRSGWDPNVTRADFERMMGEVRAGEGDVVVVNELSRLTRKGAHDALEIDNELKKHGVRFMSVLEPFLDTSTPIGVAIFALIAALAKQDSDLKAERLKGAKDEIAALGGVHSSSAPFGMRAVRKKVDNLVISVLEPDEDNPDHVELVERMAKMSFEGVSDNAIATTFEKEKIPSPGMAERRATEKRLASVKARRLNGAEKPIMWRAQTVRWILNHPAIGGFAFERVKHGKAHINVIRRDPGGKPLTPHTGILSGSKWLELQEKRSGKNLSDRKPGAEVEPTLLSGWRFLGCRICGGSMGQSQGGRKRNGDLAEGNYMCANPKGHGGLSVKRSELDEFVASKVWARLRTADMEDEHDQAWIAAAAERFALQHDLAGVADERREQQAHLDNVRRSIKDLQADRKPGLYVGREELETWRSTVLQYRSYEAECTTRLAELDEKMNGSTRVPSEWFSGEDPTAEGGIWASWDVYERREFLSFFLDSVMVDRGRHPETKKYIPLKDRVTLKWAELLKEEDEASEATERELAAL

SEQ ID NO: 2264 - protein, 591 aa, Artificial Sequence
  Description of Artificial Sequence: Synthetic polypeptide
MDSDPRVARVGAAVRCYGYAFHSPSCSFQDRVRSRLVVASPVRDRHTHSGVSSYQHATILLHRHTRDGTISDVKNTDLIEDQRTRVALYVRVSLDRREKASVEEQLADLRLTVDRLGWDIVAELADNDVPASRYSKADRPNWMRLLQIIRRGEVDAVGFWELSRSTRRRTEWAEFAELAIDCRLRILVGSSVYRAENPHEMHILDMMATQGVLEVDQLSERIHRSQRANAERGRPAGVPGYGYRRRYDPATGRLIGQEPDPDEAKVIRMIARWLRAGRSLSWIAEELNRRRIPTDKGRVAGEKYVDSRGRERVSLGWVPANLRRVMSRPELKGIRTYKGKEVAQGQWEPILSVEEWAEVQAALNRTKQRSAATGQRYVRDAAARWLLSGIAICDVCGGDIRAVPRSRRGRPAGDDPSRWRYRCNGVYKGAPMGHVTRRADWLDEAVEALLIRELSRPDVVEAFAVQEDPGVIERARAEILKIEEELRQLEEDVAVGLVTPRIASARERALQRRLEQLRKEATPRLVDPLVGQLVGASDVWAWWQEWELDQRRAALRAVTREIRVLPARVPGRNTRPPVEEMVRIVFGPVGG

SEQ ID NO: 2265 - protein, 589 aa, Artificial Sequence
  Description of Artificial Sequence: Synthetic polypeptide
MRTDTLATATEIAAGRTPMRRAVIYARQSEAREDKSQGSTITQVRETTDLINRTEDLKLTEVYEDIDFSAFNGEERPAFERMLKDARSGLVDVIVVNYLSRLSREEPKDALPVILELQRLGVQFISVYEGVVTDDLIGLVTLLMRLNSSWEESRNKSLAVSGTKRTLKAAGGFVGGVPPFGFRTEVKQLEKLTIRVLVPEPDEVKVIQDVVNRILEHKDVPYVPGKPHPGSITGVCAWLNETGVPTRGIESHAKRGIAAPSWKVTTLRRVLTDPRLMGHQTEPIYETVPKKNGKGTWKKRVGYRSVRDEHGRPVISHKVIVDPIQYHELQKCLEVAKETSAPKGTSLTRGDSLLSALGVLTCDDGHSMCKQAGKTPRETTYICQRKKGVTSTHEGRVGVLRDRLDKYVAERILKRLKALDYHDPDDIALLVEATERFTAKHAAPDVAADKQAVTIERADYKAALAELWDDFDAGVYKGNMGRDRFIKKRDDLEAAIQRCDERLTELEGKVPTLVSPKVWTETKEPGGDMTGEGSWWHSASMTDRRDFVKLFVDKIKVSKAPNYGTEYEPVPIEERVTIEWAKPAEGSAA

SEQ ID NO: 2266 - protein, 589 aa, Artificial Sequence
  Description of Artificial Sequence: Synthetic polypeptide
MRTDTLTTATEVAAGRKPMRRAVIYARQSEAREDKSQGSTITQVRETTDLINKTEDLKLTEVYEDIDFSAFNGEERPAFERMLKDARSGLVDVIVVNYLSRLSREEPKDALPVILELQRLGVQFISVYEGVVTDDLIGLVTLLMRLNSSWEESRNKSLAVSGTKRTLKAAGGFVGGVPPFGFRTEVKQLEKLTIRVLVPEPDEVKVIQDVVARILKHKDQPYVPGKPHPGSITGVCAWLNETGVPTRGIESHAKRGIAAPSWKVTTLRRVLTDPRLMGHQTEPIYETVPKKNGKGTWKKRVGYRSVRDEHGRPVISHKPIVDPIQYHELQKCLAVAKEKSAPKGTSLTRGDSLLSALGVLYCEGAHTMCKQAGNTPRETTYMCQRKKGVTSTHEGRVGVLRDRLDKYVAERILKRLKALDYEDPDDIALLVEATERFTAKHAAPDVAADKQAVTVERADYKAALAELWDDFDAGVYKGTMGRDRFIKKRDDLEAAIQRCDERLTELEGKVPTLVSPKVWTETKEPNGDMTGEGSWWHSATMADRRDFVKLFVDKIVVSKAPNHGTQYEPVPIEDRVKIEWAKPAEGSAA

SEQ ID NO: 2267 - protein, 588 aa, Artificial Sequence
  Description of Artificial Sequence: Synthetic polypeptide
MSTLYLPPQYQGPPDAGDLWLGYIRVSTWKEEKISPELQETAIRQWAARTGRRLLEPMIVDLDESGRHFKRRIMGAIERVERREARGIAVWRFSRFGRNRTGNAAALARLEAVGGELESATEPVDARTAVGELQREMIFAFGNFESNRAGEQWRETHEHRIKNQLPATGRRRFGYVWHPRRVPDLDASGGFRLQDERYTLHPDFASIVEEMYERKLDKPVGQGLNTIAHWLNEELQVPTLRGGLWHTSTIARYMDSGFAAGWLRIHDRECRCGYGKDQKISKCQNDRMIYVPGAQPKIIEPEMWEEYQAHRKLTKPIAPRARKATYTLSGMLSHGRCRHHMSHASDSRKTGQVSGYWLVCSRNKNVSKIACPKGINVKREQVEDEVFDWLGREKIADDVDALAPVVENTAPKEDPKQAAQRKRAHLTRELRTVDAAIDRLVEENAMNPQKYPGESFERVKAKFLDRKGKLVKELNDLGEVETMPVREDFKELIVGLLDEWETFQPIERNAMLLQIVRRVACYDIRDDEGKLLSVRTEVHPLWEPDPWAPKKVCRGPFGTRPGWTPADLWNGPDAIEAAIEAALAEADA

SEQ ID NO: 2268 - protein, 588 aa, Artificial Sequence
  Description of Artificial Sequence: Synthetic polypeptide
MRTDTLATATEVAAGRTPMRRAVIYARQSEARKDKSEGSTVTQINDGTAFIEKAEDLKLTKVYEDIDFSAFTGDERPDFENMLRDARAGLIDVIVVLYIARLSRQEPKDALPVILELQRLGIQIISVYEGAVTDDLIGLVTLLMRLNAAYEESANKSKAVSGTKRTLKAAGGFVGGVPPFGFRTEPKREGKLTIRVLVPEPDEVKVIQVVVARILKYKDHPYVPGKPHPGSITGVCAWLNETGVPTRGVESHAKREIAAPSWKVTTLRRVLTDPRLMGHQTEPMYETVPKKDGSGTWKKRIGYRSVRDESGRPRIVHDEIIDPVRFYELQKCLSIAKETSAPKGTSLTRGDSVLSALGVLFCEGGHTMCKQAGNSPRDTTYMCQRKKGVTSSHEGRVGVLRDRLDKYVAERILKRLKALDYHDPDDIALLVEATQRYTAKHTSPDVAADKSAVTVERADYKAALAELWDDFDAGVYKGTMGRDRFIKKRDDLETAIARCDERLNELEAKVPTLVSPKVWTETKEPGGDMTGEGSWWHSASMTDRRDFVKLFVDKIVVSKAPNYGTQYEPVPIEERVKIEWAKPAESAA

SEQ ID NO: 2269 - protein, 587 aa, Artificial Sequence
  Description of Artificial Sequence: Synthetic polypeptide
MEGLFLFDGGIMKKNFKMPGSSSETPIRVAIYVRVSTVYQIDKDSLPMMKQDLTSYCKYILNTDDFVIFEDAGYSGKNTDRPAYQKMMSQIRQGLFTHLLVWKIDRISRNLLDFANMYAELKDLGVTFVSKNEQFDTSTAIGEAMLKIILVFAELERNMTSERVTATMINRASNGVWNGGRIPFGYSYDKPTQVFSIDPEENKVYNFLVETYEDTQSIVHTSRRLNEAGYRSRNGNMWSPVAVWTILRNPWYKGVYRYNYYKIPGRKAIKDESEWVIVENHHPASIDPDRFDRIQATLDKNARYRNTPGRKTAQKNVHVFSGLVWCAECGSAFTASPGKLHVSGYRPSKYGCPNVRKTKTCHAKYTSDVVLGEFLLNYILNILNAQKQFAYIHSTDDLQKRLLHGSTFSNVDHVDPDGLASLLNMLEKCSGSDPVLLKRPRSKPKMDPELKRMMADQKKQQRALDRLNDLYLYSDDSISEREYLVRKQQITDRLQEINEAIGMMSQEPWMRTMNDEEFIRQASSFILTQKLADKQYIYYENLAESLDPEILKNFFVSILDSIILRDGRPETVVFRNGLSHTFTYKDS

SEQ ID NO: 2270 - protein, 582 aa, Artificial Sequence
  Description of Artificial Sequence: Synthetic polypeptide
MAKVEIIKANKELSNRNKKGPIEILRVGAYCRVSTDSEDQISSYKSQVAYYDDLIDNNPNWIKVDIYADEAITGTQVTKRTDFQRLINDCMNHEIDMVITKSISRFARNTLDTLKYVRMLKENNVAVYFEDEKINTLTMDGELLLVVLSSVAQQEVENISANVKKGLKMRMSRGELIGFNGCLGYDYHAEDKSLSVNEEEAETVRYIFNRYIEGAGCFVIARELENLGYKTAGGKTKWFDSSVRGIIKNEKYVGDIRAGKTFTVDPISKRRLKNLGEEDQFYIRDHHEPIISREVFDKAHEILNIRAESYKRYERGKSSRNKFTRQYAFSCIMECGYCGARLTRRHWMGKNGYSKIIWQCVTYARKGHKNCPYCKGVAESLIEEAFVKSYQYLFETNRYLIDDFMLKLEQNLSRKNYEKERDELSRKLSDLSKKRNALIDMKLDSVIDDQAYESKYYDLTDKINLATTKLESIEKSIVDDLDEKERLQEIRKVLSNNQTIETFDRKVFESIVSKVIVGGFDAEGNACPYNVTFILKSGLSDYPYTIGMKPETSEVIPSNNHSPHKETPTCGGYCVAHQIVAK

SEQ ID NO: 2271 - protein, 579 aa, Artificial Sequence
  Description of Artificial Sequence: Synthetic polypeptide
MITVALYARVSSKSQAQNNTIESQIAELKHRIAADKHELLNEYEFKDDGLSGWSLEREGLDALRDKVGEDQIDKIYIHSPDRLSRKSAHQMILLDEFEKAGVEVIFLNHKTENNPESKLLLGMQGLVAEYECTKIMERSRRGKLHRAKKGCVSVIGIAPFGYNRIKHVDREKTKFEINEEEAKIVKQMFMWVGQERISIREVVRRLRDKSIRTRTGKKVWCPIIIWKLLRNPAYKGQAAFGKLKRVERRERNKQKVSICRTDEDSWIYIPVPKIVDEGLFNKVQKQLDENRKRARIQREGGKKKYLLQGLVVCQNCGYAYSGAQCGVEGKKFSYYRCSSTIRITDGREKCTNKLVRTDMLETAIWEKVKNLLKNPEIIKNEYHRRIAENKNDESSDKKFARRENQIKQGIEKLMEDYYSQENVGDKGYISKEEFKQTMKRMRERLRGIEEEKKKVADQKAIEKGMNLIINSIKSLYSSVKSNLEQLDWQTKRGIIKALVERIQIGYDQVEVAFRIEEPAQGGEIFNLQHCTGRHDVYNNVTKNNIIEFSRIIPRVFLCSKRGNLNNKINTLLIYTEGIL

SEQ ID NO: 2272 - protein, 578 aa, Artificial Sequence
  Description of Artificial Sequence: Synthetic polypeptide
MTSLYVPPASAALRGELPWVPYIRVSTWKEEKISPELQLTAIQQWAHRTGRTLLDPPIVDLDATGRNFKRKIEQALEHVEDRRAQGIAVWKFSRFGRTRTGNALALARLERVGGELESATEPLDAKTAIGELQREMIFAFGNFESNRAGEQWKETHEHRRKLKLPASGGQRFGYIWHPRRVPDATVPGGVRLQEERYDYHPEYASVLEELYEKKTSGQGFHLLAHWLNEELAVPTMRGARLWQNATVQRILDSGFGAGLLRSHDPECPCGYGIQHRDNCKEGRMLFLPGGQPPVIDLQKWEEYQAHRADIKGRAPRLRKATYPLSGLTAHMLCRGKCQAKSGTNRTHAAYGTPKPGYAIACSKRNDQGRAGCPTGVHVLRTEVEAEVLRWLADNVAEDVDAAPSEHRAEGGNGDAEARANLARARLTAELTKLEKAIDRLVTNHALNPDMYPNDSFGRVRNELVEQRQKVAEQIKKLTTETARMPTKEEIRPLMVGLMEEWETFDNEELNAMLRQVIRRVACEVHGVYRKEKQTIEYEVHPVWEPDPWACEKCGTVMTGLAPRVCRNKECAAFGSDVI

SEQ ID NO: 2273 - protein, 578 aa, Artificial Sequence
  Description of Artificial Sequence: Synthetic polypeptide
MTSLYVPPASAALRGELPWVPYIRVSTWKEEKISPELQITAIQQWAHRTGRTLLDPPIVDLDATGRNFKRKIEQALEHVEDRRAQGIAVWKFSRFGRTRTGNALALARLERVGGELESATEPLDAKTAIGELQREMIFAFGNFESNRAGEQWKETHEHRRKLKLPASGGQRFGYIWHPRRVPDATVPGGVRLQEERYDYHPEYASVLEELYEKKTSGQGFHLLAHWLNEELAVPTMRGARLWQNATVQRILDSGFGAGLLRSHDPECPCGYGIQHRDNCKEGRMLFLPGGQPPVIDLQKWEEYQAHRADIKGRAPRLRKATYPLSGLTAHMLCRGKCQAKSGTNRTHAAYGTPKPGYAIACSKRNDQGRAGCPTGVHVLRTEVEAEVLRWLADNVAEDVDAAPSEHRAEGGNGDAEARANLARARLTAELTKLEKAIDRLVTNHALNPDMYPNDSFGRVRNELVEQRQKVAEQIKKLTTETARMPTKEEIRPLMVGLMEEWETFDNEELNAMLRQVIRRVACEVHGVYRKEKQTIEYEVHPVWEPDPWACEKCGTVMTGLAPRVCRNKECAAFGSDVI

SEQ ID NO: 2274 - protein, 578 aa, Artificial Sequence
  Description of Artificial Sequence: Synthetic polypeptide
MGYVTKKAAQRFEEKKAAIYVRVSTQYQVDRASLPVQREELINYAKYALGISDYVIFEDAGYSAKNTDRPDYQQMMARMRTGEFSHLLVWKIDRISRNLLDFSVMYAELKELGVVFVSKNEQFDTSSAMGEAMLKIILIFAELERKTTSERVSAVFVSRANDGIWNGGKVPYGYSYDKESKTFSIAEDEAKIVRLIYSLYESEKSIVRVARIMNERGLKSRAGSDWSPTTVHTILSSPFYSGTYRYNYRDESNAKRFREKGKDEWVLVENHHPAIVSPERQAAVGVILESKRYNKNATYQRKNVHVFAGLLTCGCCGSTMAATTDKVRADGWRPSMYICSRRRKSEDCTNKYVSDVTLGPFVLNFFANLIKASNSFGRTTSIETLEKKLLRGEALSHVDHIERPGLEELYNHLRSGFDEKCFESPTIAATESSADLSERDLLLSEKRRLERALNRLKTIYLYGDDEMASKDFNIERERITKALSEVDSRINELDIANAFDLSLSDEAFMQKASQFILTQQLLDKRYVNYERFIRKIDPKIVKDFLNETVSNFCIKDGLTTSILLKNGIELRFSYKTAE

SEQ ID NO: 2275 - protein, 577 aa, Artificial Sequence
  Description of Artificial Sequence: Synthetic polypeptide
MTSLYVPPSFTGGPPPDDLPWLGYIRVSTWKEEKISPELQESAIRQWAARTGRRLLDEMIVDLDATGRNFNRKIQQAIEAVENRKARGIAVWRFSRFGRNRTGNAVALARLERAGGDLESATEPLDAKTAVGELQREMIFAFGNFESNRAGEQWRETHEHRRNLKLPATGGHRFGYIWHPRRVPDATAPGGWRLQEEFYEVHPEYASIAEEMYDRKLNLGGFSGIAHWLNDELGVPNLRGNRWKTRGVRRYLDSGFAAGLLRTHDPKCGCGYGTTHFEQCKEGRVLYLPGAQPALITPQEWEAYLDHREDIKSRPPRTRKAVYTLSGISGHGHCRGTAVFRNDRVRSGENKGAPIRGHHLVCSANKNQGKSACEPGLYVLRTEAEEAVLQWLADKVAEDVDALVPEPRKERVPEVDPRARAIHERARIEAEVAKLDAAIGRLVVDNAKDPDKFPEGAFEAARNQLVKEKGEALDDLKKIAAVEAMPTQEKFRPLMVGLIEEWETFSAEERNAMLRQVIWRAVMTTTPAPEKIGRKSLVATFEVHPKWEPDPWKCKRCGKHIPGPGPLVCPDGKCQRA

SEQ ID NO: 2276 - protein, 576 aa, Artificial Sequence
  Description of Artificial Sequence: Synthetic polypeptide
MIQDTFVRQRAKQLYWQGYPPAEIARLMGINQNTIYAWKKRDEWYETPPVQRVSQSMDARLIQLTDKKDKTGGDFKEIDLLTRQLKKLSAGQPAGAGAGKKPRKRKLKNHFTEEQIVALREKILDSLSWHQRGWYEQRHHRNRMILKSRQIGATWYFAREALLDALRDDVKYPYQRNQIFLSASRRQAHQFRGFIQKMAEEVDVELKGGDKIVLSNGAELHFLGTSAATAQSYTGNLKFDEFFWVSNFTNLRKVAGAMATLKGLTRTYFSTPSGETHEAYPFWTGDRWNEKRPKAQRKAFDVGWKTLNSGLLCPDKTWRQIVTLKDVIDHGWEYTDLEEIQDENSEDEFRNLYMCEFVRDGESAFNLNALIGCGVDGYDEWPDWKPFASRPMGNRPVWIGYDANGSSGNGDSGAICVVVPPLVPGGKFRTVETEQVRGLEFEEQAKVIENFTFKYNVQHVGIDVTGGNGEAVYQIVKKFFPMAMPYTMSMTSKRALVLKMLQLIRAGRWEYDRSERALINAFNSVRKVKTPGGFITYDTDRSRGVSHGDLAWANMLAIINEPLGQESGSGGFAMEF

SEQ ID NO: 2277 - protein, 573 aa, Artificial Sequence
  Description of Artificial Sequence: Synthetic polypeptide
MKLDIPSTFHGSRTFGEPWLGYIRVSTWREEKISPELQQSAIESWAARTGRRIVDWIVDLDATGRNFKRKIMGGIQRVEGREAVGIAVWKFSRFGRNDLGIAINLARLEQAGGDLASATEEVDARTAVGRFNRAILFDLAVFESDRAGEQWKETHAHRRALKLPATGRQRFGYVWYPRRVPDLTAPGGFRLQEERYERHPEFAPVAAELYERKLAGQGFSQLAYWLNDELLIPTTRGNRWGTNTVQRYLDSGFAAGLLRVHDPECRCKLGQDHFSACKENRWLWLPGAQPALIVPEQWKEYGAHREQTRRTPPRARRASYPTSGIMRHGHCRGTAVARSGRDGKGGFVPGHVFVCFNRRNKGKSACEPGLYVRRDEVEAEVLKWLADTVADDIDNAPSLPAQHTAPSTAPNPRARLVEERTRTEAELAKIEGALDRLVTDYAMDPDKYPADTFGRVRDQLLNKKGDIVKHLKSLSEVEVEPTREEFRPLIVGLLQEWDILHTTEKNAMLRRLLRRLVINSRMTVDLKDATTAGGSTRTAPVPSRYRGRFAFGGRAAPAGVGCGAAVRGRPTRS

SEQ ID NO: 2278 - protein, 571 aa, Artificial Sequence
  Description of Artificial Sequence: Synthetic polypeptide
MDTHAGVYARQSKRRANKSEISTADQLKEGVARARSMGATQIATYEDLGISAYSGDERPDFERLVADCRAGRINVLIVYYISRLSRREVADVLPLLQELLTRGVTLVSITEGVFKRDNIMDLIHLIFRLDAAHQESKNKSLAVKNAKDRARALGGHVGSAPFGFETYEVIVQTKGEDGRSRPVAIRRLRPNKEDCKIAVEHIFTPVLKYMDLPFDPTRSEFHPGSVSGVTTAMNQKAIPTRGKKLGKARATAQWERKTIRRILMDPRFIGYEADTIYNSAGTRKISSYRIRRDENGNPVRTSWEPIVDPADWWRIQEWLAGRQAAKGNNRGGSLLSGDGLAWCPCGSTFGQHSFPPVKERNRDRTRVYRCTKGQRQSDVHTGAVMVSMANLDNYVVNRIFSLIGAAEGDEDTLLILLEAQRRYGRLRENPETAGERDRILTERAEVRQGLEDLYDERDAGGFRTDIGRRRFLKSEAALGERLEGLDRRLAELEEAHAPKLPLAMWEAEGRDPMREGGWWSTRSLEDQREFVRLFVKRVTVRPLKRRGVAEPMHERVKIEWHRPTEEVDLVA

SEQ ID NO: 2279 - protein, 571 aa, Artificial Sequence
  Description of Artificial Sequence: Synthetic polypeptide
MTGRRADYQTLVSLGLSEDDMRAMGLWDPAEGDPETLMDLYLRRSTKREDVATLRGHLRDAVRYASQTDRTIRHVWFEQLSASKTYVRRREFEKATQAVLDGMSKTLGVWKTDRFDRRGMGAVGRLLDEFDTRRAGLVSITEGLDSRQRGARMLFALLSERAREEAKDIALRVKAGHDAHKEENRRGTGKPPFGTLSPRTADGKPSGKVEPNPDEFETARRLLDLLLGTAEGLPDEWADKEGQPLTTKDVAHILNVEKRTTRGGHTWSPTAVSKLAQSPLFYGMVPVRERKTDEHGNPLGEWKGYGEPATDEKGNVRMCGTGVGKPAEFWRVRELIRSRTNEDFGKGQPGAKYLGTGVYRCGRLRDKGKGKEEHCLASMSHRGGRYRCQDRQTRGAVVCEGCTTLCERIDAAVGNAWLAHVAALEPGDPVLLEIGRRWLAFSNPEDQAARENTLKSLDSAKARLKKLEDDYYVFGRVSDERYEELSEKLSTTIQNMTQQLEELDHGQDYSVFSDGETLRETWMETDVPTRRMLLRCALGKKGVIVLPAKRQGDPTPIEDRLIFDWLSGVPA

SEQ ID NO: 2280 - protein, 570 aa, Artificial Sequence
  Description of Artificial Sequence: Synthetic polypeptide
MTLPDIPPTFHGSAHAGEPWIGYIRVSTWKEEKISPELQRTAIEQWAARTGRRIVDWIVDLDESGRHFKRKIMGGIERIERREVRGIAVWRYSRFGRNRTGNAANLARVEAAGGLLESATEPVDASTAIGRFARGMYMEFAAFESDRAGEQWKETHEHRLAAKLPATGRGRFGYIWHRRAVPDATAPNGIRLQQERYTLHPDYASVVEELYERKTEEYEGFNALAHWLNEELVIPTLRGKAWGVSSVSRYLDSGFAAGLLRTHDKTCPCGYSSGKRSGCPDNRFIYLPGAQPRIITPDQWEAYKEHRKTTKATPPRARKATYPLTGLLRHGYCRHHMSAASYTYKGEQMRGRNLVCSRNKHTSKVECPKGINTRRDYVEREVKKWLEREAAPGIDASPRLPVQRTEPTEDPRARAQRERARLQVDLTKVEKALDRLVMDNALNPEKYPADSFARVRDQLAGQRGSIMNAMNELGEVEATPTREEFVPLIANLIEAWDLMEPIEKNALLRQIVRRIVCHDIRTEGSRWIEVRVEVHPVYEPDPWAPIAGEVVARKDEPAEVDDRADGETLF

SEQ ID NO: 2281 - protein, 570 aa, Artificial Sequence
  Description of Artificial Sequence: Synthetic polypeptide
MTLPDIPATFHGSPLAGEPWIGYIRVSTWKEEKISPELQRTAIEQWAERTGRRIVDWIIDLDESGRHFKRKIMGGIERIERREVRGIAVWRYSRFGRNRTGNAANLARVEAVGGLLESATEPIDASTAIGRLARGMYMEFAAFESDRAGEQWKETHEHRLAAKLPATGRPRFGYIWHRRRIPDPTAPDGIRLQQERYALHHDHASVVEELYERKIEEHDGFNSLVHWLNEELVIPTMRGKAWGVSSLSRYLDSGFAAGLLRTHDKTCPCGYSSGTKSRCPDNRFIYLPGAQPRIITPDQWEAYKEHRKLTKATPPRARKATYPLTGLVRHGYCRFHVSAASYTSHGEQLRGHLLVCSRHKSANRLDCPKGLSVKREYVEGEVLTWLKREAAPGIDATPSVPAQRAELVEDPRARAQRERARLQVELSKVEGALDRLVMDNAMNPEKYPADSFARVRDQFAGQRGTIIKAMAELGEAEATPTREEFVPLMLGLVAAWEHMQPIEKNALLRQLVRRVVCHDIRREGSRWIETRVEVHPVFEPDPWAPIMGEVVARRDEPAEVDDRADGETLF

SEQ ID NO: 2282 - protein, 563 aa, Artificial Sequence
  Description of Artificial Sequence: Synthetic polypeptide
MKKSAIYIRVSTHHQIDKDSLPLQKNDLINYSKFILSINDYEIFEDAGYSGKNTDRPAFQEMMNRIRNGEFTHLLVWKIDRISRNLLDFCDMYEEIKKNNCIFVSKNEQFDTSSAMGEAMLKIILVFAELERKLTGERVTSVMLDRATKGLWNGAPVPLGYKWCEETKFPIIDENERLTVEFIYNKYLETESTSAVRNALNAESIKTKRGGAWTTKTISDIIRNPFYKGTYRYNYRESARGKKKNEKEWIIVDDNHSSIINKELWSKCNTIMDENAERNSARFRSNSKTHVFARLLECGECNRNLYAKQDKPSLDGFIPSLYICSGRYNGLGCSQKTISDKIIGTFILNYVSNIIRLHKTLKLSQLKVDELEKLLLKGKPFENVVGIKNKSLNELYFALTQYTKGDKRIFMPKENKILEIEDDSSVEKLLRERNKFERALSRLEDLFLFDENEMSEKDYILKKNKIKEKLNEINKKMNELNSIKNIGSVYELDFLISSSKNAILFEELTQSKSIDYNNLIKETDRKVIKSFINAIITKIVVKDKNILSVKFKNGLVTEFIYNN

SEQ ID NO: 2283 - protein, 560 aa, Artificial Sequence
  Description of Artificial Sequence: Synthetic polypeptide
MAKKPKAKVYSYLRFSDPKQAAGSSADRQMEYAARWATEHDMQLDATLTLRDEGLSAFHQRHIKQGALGVFLRAIEDGRIQPGSVLIVEGLDRLSRAEPIQAQAQLAQIINAGITVVTASDGREYNRERLKAQPMDLVYSLLVMIRAHEESDTKSKRVKAAIRRQCEGWVAGTWRGIIRNGKDPHWVRLGEHGKFEHVPERVLAVRTMIDLFLEGHGAIEITRRLTEQNLYVSNAGNYSVHMYRIVRNQALIGEKRISVDGEEFRLDGYYPPILTREEFAELQQTMSERGRRKGKGEIPNIITGLSITVCGYCGRAMTTQNSKARAPKGKSVVRRLSCPMNSFNEGCPIGGSCESEIVERALMRYCSDQFNLSRLLEGDDGTARRTAQLAVARQRASDIEAQIQRVTDALLSDDGKAPAAFTRRARELETQLEEQRREIEALEHQIAASSAHGIPAAAEAWAQLVDGVLALDYDARMKARQLVADTFRKIVVYQRGFAPIDDAAADRWKRSGTIGLMLVTKRGGMRLLNVDRRTGCWQAEDDLDPSLIPSDGLPMLPLDA

SEQ ID NO: 2284 - protein, 551 aa, Artificial Sequence
  Description of Artificial Sequence: Synthetic polypeptide
MYHMPSKRALLVIRLSRVTDATTSPERQLADCQALCAQRGYEVAGVAEDLDVSGSIDPFDRKKRPNLAHWLHDRHNEFDVVVAYRVDRLTRSVRYLQKLVNWAEDHDKLVVSATEPHFDTTSPFAAVLIALLGTVAQMELEAIAERNRSAARHNIRAGKYRGSKPPWGYMPQRDDEGVWRLVQDPDQVKIIHEVVQRVLEGEPTQRIANDLTLRGIPTPKDAFAISQGRKPEGLAWNMTTLKRSLKSEAMLGRVTNAAGKSIRKEDGAPVIRSTPILTREVFDRVQVELETRARSGGPTTRSTALLLRVIYCAICGMPAYQYSGGTSGKASRYRCSSSPRSNTDPNIKKCGNRTFAVAEADAVVVKTLLGLLGDSERKEKIWESGCDHSAELADLDATLADLTDQLGTGVFARGTPQRARLDARIAELAARQAALSAEAVRPAGWTWHGTGERFSDWWERQDVTAKNVWLRSMNIQLTFDRERFYLDLGDIVQLTEQFDPQGPVAQWQGLLAAMQAEGIAGVEIRGGEAQATPRDDDMRGALGMTGAPLAD

SEQ ID NO: 2285 - protein, 551 aa, Artificial Sequence
  Description of Artificial Sequence: Synthetic polypeptide
MKKMKIKIAIYVRVSTHHQVDKDSLPLQRSDLINYCKFIIGSNDYEIFEDAGYSGKNTSRPKYQEMMNRIKEGEFSHLLVWKIDRISRNLLDFCDMYENLKKYNCTFISKNEQFDTSSAMGEAMLKIILVFAELERKLTAERVKAIMLDRASKGMWNGAPIPLGYSWDETIKFPVPDPNESKTVDFIFNQYKKVKSTSIVRNILNSNGIKTKKGGTWTTKTITDIIRNPFYIGTYRYNFREPARGKKKDESEWIVLENNHEGIISKELWQECNDIMDRNASRSNAQFRDNTKTHIFSRLLECGECHGSLTAKQDKPHLDGYIPSIYCCSSRYNNLGCNQKTVSEKIIGNFTFNLISEIIKSSKNESISNEYELEKALLKNESLKNVIAIDGTYELYNNIFNDNDNFKIKKEEESISFEVEGLKKEKEKYKRALERLENLYLFDDESMSKKDYLIKKNRLKDKLIEIGYKLSSYKINTNDDINFIKLAANAILNDTLAKDENIDIKNFITEVGRDVIKEFTNAIISKITTKDKRVTSIKFKNGINLNFIYNT

SEQ ID NO: 2286 - protein, 551 aa, Artificial Sequence
  Description of Artificial Sequence: Synthetic polypeptide
MSATAQVSATSPTPFMAGMTTPLRGLSVLRLSVLTDETTSPERQRAANHGAGSALGIDFSDREAVDLGVSASKTTPFERPELGAWLRRPDDFDALVFWRFDRAVRSMDDMHELSKWARDHRKMIVIAEGPGGRLVLDFRNPLDPMAQLMVTLFAFAAQFEAQSIRERVLGAQAAMRVMPLRWRGSKPPYGYMPAPLEGGGVTLVQDKKAVAVIERVIKELMKGKTLSAICAELNAAGIPSPRDHWSLIQKRKKGGRVGNSVGEKITKESFKWRHGALKKLLTSESLLGWKMTESGPVRDSEGAPVMATREPILTREEFDAVGALLKDENADGTKWFRSDSVAMLTRVILCDACGGNMSVGRPSANSKGISVVYKCGSWGRGEKCPEPASVKQEWADEYVRDRFLSAVGGMRQTETRHIPGYDPQPEIDATTAEYEAHMAEQGQQKSKAAQEAWKRRATALDARLAELETREARPARVEVIELDKTVADAWRDTDDKGRRDMLRDAGVTIRIKRAKRGRTFKLNEDRVIWHMDNEFFAQGAEELEGIARAEA

SEQ ID NO: 2287 - protein, 550 aa, Artificial Sequence
  Description of Artificial Sequence: Synthetic polypeptide
MITVALYARVSSKSQAQNNTIESQIAELKHRIAADKHELLNEYEFKDDGLSGWSLEREGLDALRDKVGEDQIDKIYIHSPDRLSRKSAHQMILLDEFEKAGVEVIFLNHKTENNPESKLLLGMQGLVAEYECTKIMERSRRGKLHRAKKGCVSVIGIAPFGYNRIKHVDREKTKFEINEEEAKIVKQMFMWVGQERISIREVVRRLRDKSIRTRTGKKVWCPIIIWKLLRNPAYKGQAAFGKLKRVERRERNKQKVSICRTDEDSWIYIPVPKIVDEGLFNKVQKQLDENRKRARIQREGGKKKYLLQGLVVCQNCGYAYSGAQCGVEGKKFSYYRCSSTIRITDGREKCTNKLVRTDMLETAIWEKVKNLLKNPEIIKNEYHRRIAENKNDESSDKKFARRENQIKQGIEKLMEDYYSQENVGDKGYISKEEFKQTMKRMRERLRGIEEEKKKVADQKAIEKGMNLIINSIKSLYSSVKSNLEQLDWQTKRGIIKALVERIQIGYDQVEVAFRIEEPAQGGEIFNLQHCTGRHNSEAIVFAFANLQIKR

SEQ ID NO: 2288 - protein, 548 aa, Artificial Sequence
  Description of Artificial Sequence: Synthetic polypeptide
MQEKPKVYSYLRFSDPKQATGSSADRQLEYAHRWGAEHGMQLDASLTLRDEGLSAYHQRHVTRGALGTFLRAVEDGRVPTGSVLIVEGLDRLSRAEPIQAQAQLSQIVGAGITVVTASDGREYNREKLRAQPMDLVYSLLVMIRAHEESDTKSKRVKAAIRRQCQGWIAGTHRKPIRVGRDPQWVREVDGRFELIPERAEAMRLAVSMYLDGHGAHSIVRHLASRGLVISDKSKTNSSHLYKILVNRCLVGEKTVEIDGEEFRLEGYYPAVLKGPEFDKMRAIGDLRMRQKGKGEIPGIITGIGICVCGYCGKPMTAQNLNKHSKITGRRLNGFRRIMCNSFRSTEADCPMPGSVSARPIERAITHYCADQMNLTSLIEGDSGATAISAKLVRARQRANEVEAQVERLTDMLIDDKDAAPAAVLKRIRDLEAQGERYRNDIEALERELATAARTPPGAAQAWADLVKGIEELDYDTRMKGRRLVSETFSRIVVYTRGFTPRDDDRSIGLLLVAKRGTTRMLNVHRKTGEWQAAEELASHDIPLPQAAE

SEQ ID NO: 2289 - protein, 548 aa, Artificial Sequence
  Description of Artificial Sequence: Synthetic polypeptide
MPSKRALLVIRLSRVTDATTSPERQLADCQALCAQRGYEVAGVAEDLDVSGSIDPFDRKKRPNLAHWLHDRHNEFDVVVAYRVDRLTRSVRYLQKLVNWAEDHDKLVVSATEPHFDTTSPFAAVLIALLGTVAQMELEAIAERNRSAARHNIRAGKYRGSKPPWGYMPQRDDEGVWRLVQDPDQVKIIHEVVQRVLEGEPTQRIANDLTLRGIPTPKDAFAISQGRKPEGLAWNMTTLKRSLKSEAMLGRVTNAAGKSIRKEDGAPVIRSTPILTREVFDRVQVELETRARSGGPTTRSTALLLRVIYCAICGMPAYQYSGGTSGKASRYRCSSSPRSNTDPNIKKCGNRTFAVAEADAVVVKTLLGLLGDSERKEKIWESGCDHSAELADLDATLADLTDQLGTGVFARGTPQRARLDARIAELAARQAALSAEAVRPAGWTWHGTGERFSDWWERQDVTAKNVWLRSMNIQLTFDRERFYLDLGDIVQLTEQFDPQGPVAQWQGLLAAMQAEGIAGVEIRGGEAQATPRDDDMRGALGMTGAPLVD

SEQ ID NO: 2290 - protein, 547 aa, Artificial Sequence
  Description of Artificial Sequence: Synthetic polypeptide
MWACSHLRADGTTPTSSSTLLTMSARDYDIEAEWTPADLALLKELEEAEALLPADAPRALLSVRLSVFTDDTTSPVRQELDLRQLAREKGHRVVGLASDLNVSATKVPPWKRKSLGDWLNNRAPEFDALLFWKIDRFIRNLNDLNVMIRWSETYSKNLISKNDPIDLTTTMGKMMVSLLGGVAEIEAANTKTRVESLWDYTKTQGEWHVGKPPFGYKTARDEAGKVVLVEDPLAVETLHTARELVMSGMSTTAAAKVLKERGLISSTTATLTRRLRNPGVLGLRVEEDKDGGIRRSKLILGRDGQPIRIADPIFTEEQFEELQAVLDKRGKRQPHRQPGGATSFLGVLKCAVCETNMINHYTRNRHGDYAYLRCQGCKSGGYGAPNPQEVYDRLVEQVLAVLGDFPVEMREYARGEEKRKELKRLEESIAYYMKELEPGGRFTKTRFTQDQAEGTLDKLIAELEAIDPESAKDRWVYVAGGKTFREHWEEGGIDAMSADLIRAGIMCQVTRTKVPKVRAPQVHLKLMIPKDVRTRLVIRPDDFGQTF

SEQ ID NO: 2291 - protein, 547 aa, Artificial Sequence
  Description of Artificial Sequence: Synthetic polypeptide
MWACSHLRADGTTPTSSSTLLTMSARDYDIEAEWTPADLALLKELEEAEALLPADAPRALLSVRLSVFTDDTTSPVRQELDLRQLAREKGHRVVGLASDLNVSATKVPPWKRKSLGDWLNNRAPEFDALLFWKIDRFIRNLNDLNVMIRWSETYSKNLISKNDPIDLTTTMGKMMVSLLGGVAEIEAANTKTRVESLWDYTKTQGEWHVGKPPFGYKTARDEAGKVVLIEDPLAVETLHTARELVMSGMSTTAAAKVLKERGLISSTTATLTRRLRNPGVLGLRVEEDKDGGIRRSKLILGRDGQPIRIADPIFTEEQFEELQAVLDKRGKRQPHRQPGGATSFLGVLKCAECGTNMINHFTRNRHGDYAYLRCQGCKSGGYGAPNPQEVYDRLVEQVLTVLGDFPVEMREYARGEEKRKELKRLEESIAYYMKELEPGGRFTKTRFTQDQAEGTLDKLIAELEAIDPESAKDRWVYVAGGKTFREHWEEGGIDAMSADLIRAGIMCQVTRTKVPKVRAPQVHLKLMIPKDVRTRLVIRPDDFGQTF

SEQ ID NO: 2292 - protein, 547 aa, Artificial Sequence
  Description of Artificial Sequence: Synthetic polypeptide
MKRDLPSTFRGSRTPGEPWLGYIRVSTWREEKISPELQQSAIESWAARTGRRIVDWIVDLDATGRNFKRKIMGGIQRVEGREAVGIAVWKFSRFGRNDLGIAINLARLEQAGGDLASATEEVDARTAVGRFNRAILFDLAVFESDRAGEQWKETHAHRRALKLPATGRQRFGYVWHPRRVPDLTAPGGFRLQEERYERHPEFAPVAAELYERKLAGQGFSQLAYWLNDELLIPTTRGNRWGTNTVQRYLDSGFAAGLLRVHDPECRCKLGQDHFSACKENRWLWLPGAQPALIVPEQWKEYGAHREQTRKTPPRARRASYPTSGIMRHGHCRGTAVARSGRDGKGGFVPGHVFVCFNRRNKGKSACEPGLYVRRDEVEAEVLKWLADTVADDIDNAPALPAQRTAPGTAPDPRARLVEERTRTEAELAKIEGALDRLVTDYALDPDKYPADTFGRVRDQLLGKKGDIIKHLKSLSEVEVAPTREEFRPLIVGLLQEWDILHTTEKNAILRRLLRRLVIHNRKSDQGAQWSVVRSFEFHPVWEPDPWS

SEQ ID NO: 2293 - protein, 547 aa, Artificial Sequence
  Description of Artificial Sequence: Synthetic polypeptide
MKLDIPSTFHGSRTFGEPWLGYIRVSTWREEKISPELQQSAIESWAARTGRRIVDWIVDLDATGRNFKRKIMGGIQRVEGREAVGIAVWKFSRFGRNDLGIAINLARLEQAGGDLASATEEVDARTAVGRFNRAILFDLAVFESDRAGEQWKETHAHRRALKLPATGRQRFGYVWYPRRVPDLTAPGGFRLQEERYERHPEFAPVAAELYERKLAGQGFSQLAYWLNDELLIPTTRGNRWGTNTVQRYLDSGFAAGLLRVHDPECRCKLGQDHFSACKENRWLWLPGAQPALILPEQWKEYGAHREQTRRTPPRARRASYPTSGIMRHGHCRGTAVARSGRDGKGGFVPGHVFVCFNRRNKGKSACEPGLYVRRDEVEAEVLKWLADTVADDIDNAPSLPAQHTAPSTAPNPRARLVEERTRTEAELAKIEGALDRLVTDYAMDPDKYPADTFGRVRDQLLNKKGDIVKHLKSLSEVEVEPTREEFRPLIVGLLQEWDILHTTEKNAMLRRLLRRLVINSRKSDQGAQWSLVRTYEFHPVWEPDPWS

SEQ ID NO: 2294 - protein, 547 aa, Artificial Sequence
  Description of Artificial Sequence: Synthetic polypeptide
MWACSHLRADGTTPTSSSTLLTMSARDYDIEAEWTPADLALLKELEEAEALLPADAPRALLSVRLSVFTDDTTSPVRQELDLRQLAREKGHRVVGLASDLNVSATKVPPWKRKSLGDWLNNRAPEFDALLFWKIDRFIRNLNDLNVMIRWSETYSKNLISKNDPIDLTTTMGKMMVSLLGGVAEIEAANTKTRVESLWDYTKTQGEWHVGKPPFGYKTARDEAGKVVLVEDPLAVETLHTARELVMTGMSTTAAAKVLKERGLISSTTATLTRRLRNPGVLGLRVEEDKDGGIRRSKLILGRDGKPIRIADPIFTEEQFEELQAVLDKRGKRQPHRQPGGATSFLGVLKCAECGTNMINHFTRNRHGDYAYLRCQGCKSGGYGAPNPQEVYDRLVEQVLAVLGDFPVEMREYARGEEKRKELKRLEESIAYYMKELEPGGRFTKTRFTQDQAEGTLDKLIAELEAIDPESAKDRWVYVAGGKTFREHWEEGGIDAMSADLIRAGIMCQVTRTKVPKVRAPQVHLKLMIPKDVRTRLVIRPDDFGQTF

SEQ ID NO: 2295 - protein, 547 aa, Artificial Sequence
  Description of Artificial Sequence: Synthetic polypeptide
MWACSHLGADGTTPTSSSNLLTMSARDYDIEAEWTPADLALLKELEEAEALLPADAPRALLSVRLSVFTDDTTSPVRQELDLRQLAREKGHRVVGLASDLNVSATKVPPWKRKSLGDWLNNRAPEFDALLFWKIDRFIRNLNDLNVMIRWSETYSKNLISKNDPIDLTTTMGKMMVSLLGGVAEIEAANTKTRVESLWDYTKTQGEWHVGKPPFGYKTGRDETGKVVLVEDPLAVETLHTARELVMSGMSTTAAAKELKERGLISSTTATLTRRLRNPGILGLRVEEDKDGGIRRSKLILGRDGQPIRIADPIFTEEQFEELQAVLDKRGKRQPHRQPGGATSFLGVLKCAECGTNMINHYTRNRHGDYAYLRCQGCKSGGYGAPNPQEVYDRLVEQVLAVLGDFPVEMREYARGEEKRKELKRLEESIAYYMKELEPGGRFTKTRFTQDQAEGTLDKLIAELEAIDPESAKDRWVYVAGGKTFREHWEEGGIDAMSADLIRAGIMCQVTRTKVPKVRAPQVHLKLMIPKDVRTRLVIRPDDFGQTF

SEQ ID NO: 2296 - protein, 547 aa, Artificial Sequence
  Description of Artificial Sequence: Synthetic polypeptide
MWACSHLGADGTTPTSSSTLLTMSARDYDIEAEWTPADLALLKELEEAEALLPADAPRALLSVRLSVFTDDTTSPVRQELDLRQLAREKGHRVVGLASDLNVSATKVPPWKRKSLGDWLNNRAPEFDALLFWKIDRFIRNLNDLNVMIRWSETYSKNLISKNDPIDLTTTMGKMMVSLLGGVAEIEAANTKTRVESLWDYTKTQGEWHVGKPPFGYKTGRDAAGKVVLVEDPPAVETLHTARELVMSGMSTTAAAKELKERGLISSTTATLTRRLRNPGILGLRVEEDKDGGIRRSKLILGRDGQPIRIADPIFTEEQFEELQAVLDKRGKRQPHRQPGGATSFLGVLKCAECGTNMINHFTRNRHGDYAYLRCQGCKSGGYGAPNPQEVYDRLVEQVLAVLGDFPVEMREYARGEEKRKELKRLEESIAYYMKELEPGGRFTKTRFTQDQAEGTLDKLIAELEAIDPEAAKDRWVYVAGGKTFREHWEEGGIDAMSADLIRAGIQCQVTRTKVPKVRAPQVHLKLMIPKDVRTRLVIRPDDFGQTF

SEQ ID NO: 2297 - protein, 545 aa, Artificial Sequence
  Description of Artificial Sequence: Synthetic polypeptide
MELKNIVNSYNITNILGYLRRSRQDMEREKRTGEDTLTEQKELMNKILTAIEIPYELKMEIGSGESIDGRPVFKECLKDLEEGKYQAIAVKEITRLSRGSYSDAGQIVNLLQSKRLIIITPYKVYDPRNPVDMRQIRFELFMAREEFEMTRERMTGAKYTYAAQGKWISGLAPYGYQLNKKTSKLDPVEDEAKVVQLIFNIFLNGLNGKDYSYTAIASHLTNLQIPTPSGKKRWNQYTIKAILQNEVYIGTVKYKVREKTKDGKRTIRPEKEQIVVQDAHAPIIDKEQFQQSQVKIANKVPLLPNKDEFELSELAGVCTCSKCGEPLSKYESKRIRKNKDGTESVYHVKSLTCKKNKCTYVRYNDVENAILDYLSSLNDLNDSTLTKHINSMLSKYEDDNSNMKTKKQMSEHLSQKEKELKNKENFIFDKYESGIYSDELFLKRKAALDEEFKELQNAKNELNGLQDTQSEIDSNTVRNNINKIIDQYHIESSSEKKNELLRMVLKDVIVNMTQKRKGPIPAQFEITPILRFNFIFDLTATNSFH

SEQ ID NO: 2298 - protein, 543 aa, Artificial Sequence
  Description of Artificial Sequence: Synthetic polypeptide
MQNNRAAIYARFSTDLQNERSVDDQIAVCREFANRNGLVVAGEYYDKARSGASIFGRDGLLGLMEDARTGKFKTVIVEALDRLSRDQEDLAGLHKRLAFAGVEILAIHDGKTDAIQVGIRGLVSTLFLADLKNKIRRGMTGVIRDGRHAGGKAYGYQPTPGQPGVMQIFEPEAEIVRRIYRETIEGKMSREIAIGLNQDKITPPRGTQWNASTINGSAQRGYGIIRNPLYAGEIVWNRVHMVRDPETGKRISRPNPESEHKRTPAPHLAIVDRETYDQALSMLEGKSRRGQGGSNTRRPKRLLSGITRCGHCGGGMSIHDHHGKTVRIRCSRSTQSGVCGNNKRYRLDKIEKTVVTGLRDQLNHPEVLVEYVKAYREERRLDADTAVRERASVERRVADLDGQLDRLMKAMTRGILPIEAVEAQYAPLKAEKEELEKKLVDIPAVPVVELHPAAITRYKNSIDALANRLASLDDITDSDVHKAFRDLVDHVTIIDREDGGVEVEIVGQLAALVGKQAEMLGGRVVAGERFEQSPQIILGRFVA

SEQ ID NO: 2299 - protein, 542 aa, Artificial Sequence
  Description of Artificial Sequence: Synthetic polypeptide
MSEEISAPAELPPNTHQARYPGAMTQTQTPDTFRAKRRPRASLYVRLSKQADDSNLSLDGMVEDVRALCEKEGLEEVALHVDDGKSGGFRDRDEFGLWLDDARQGRCEVLVPYHTDRLTREGLNVAAQILDVVEGKDPHTGRQSHKPVRLLDCFGLDSLHGDAFRFRFVIQAEVGRSERERIRERQRARHKRLRRAGRWAGGTPPFGFRVVPNPELGDDGKPKGFVLEVVPEEAKHIKEAAYAILRPVEPDNLTRVVRRWNHQGIKPRRAAAWSRVTLRQVLTGDIIMGLATEKGKPLRDADGELQFIHPEILPPAYVHALRKALAVKKPDARKGGRRPARLLSGLLTCHACGAVLQVARRSPNAKAPKQAEVTYRCPTKANGGICAQPVSVSAVAIEEHLETRYLATVGDMPYYIERTTVTGLDELAVVDSEIKETLSAMATSADADTFARLQRLQARRQELEDAEPEKRTTLVPTGFTMREHWRDALVDDRRDLLAQAFECMVLGPGQRGPRGFNPARLVAPWAEEPDAGEDYGGETAAE

SEQ ID NO: 2300 - protein, 540 aa, Artificial Sequence
  Description of Artificial Sequence: Synthetic polypeptide
MLTMSSRKRQPAAERAAYNIDAEWTEADLALLQELEEAEARLPLDAPRALLSVRLSVFTDDTTSPVRQELDLRQLAREKGLRVIGVASDLNVSATKVPPWKRKSLGDWLSNRAPEFDALLFWKIDRFIRNLNDLNVMVRWSETYSKNLISKNDPIDLTTTMGKMMVQLLGGVAEIEAANTKTRVESLWDYTKTQGEWLVGKPAYGYMTQRDETGKVVLVIDPQASEALHLARELAIGGMAARVVADELKKRELVTGGLTASTLLRRLRNPALLGYRVEENKETTGMRRSKLLYGRDGKPIRVADPIFTQEEFDSLQAVLDARGKNQPPRHVGGATKFLGVLKCVNCETNMIVHHTRNKHGDYAYLRCQGCKSGGYGSPNPTEVYDRLVEQVLAVLGDFPVETREYARGEEMRKELKRLEESIAYYMKELEPGGRYTKTRFTQDQAEGTLDKLIAELEAIDPESAKDRWVYVAGGKTFREHWEQGGMEAMSLDLLRAGIKVQVNRTKVPKVRAPEVHLKLMIPKDVRQRLVIRPDDFGDTF

SEQ ID NO: 2301 - protein, 540 aa, Artificial Sequence
  Description of Artificial Sequence: Synthetic polypeptide
MLTMSSRKRQPAAERAAYNIDAEWTEADLALLQELEEAEARLPLDAPRALLSVRLSVFTDDTTSPVRQELDLRQLAREKGLRVIGVASDLNVSATKVPPWKRKSLGDWLSNRAPEFDALLFWKIDRFIRNLNDLNVMVRWSETYSKNLISKNDPIDLTTTMGKMMVQLLGGVAEIEAANTKTRVESLWDYTKTQGEWLVGKPAYGYMTQRDETGKVVLVIDPEASEALHLARELAIGGMAARVVADELKTRELVTGGLTASTLLRRLRNPALLGYRVEENKETTGMRRSKLLYGRDGKPIRVADPIFTQEEFDSLQAVLDARGKNQPPRHVGGATKFLGVLKCVNCETNMIVHHTRNKHGDYAYLRCQGCKSGGYGSPNPTEVYDRLVEQVLAVLGDFPVETREYARGEEMRKELKRLEESIAYYMKELEPGGRYTKTRFTQDQAEGTLDKLIAELEAIDPESAKDRWVYVAGGKTFREHWEQGGMEAMSLDLLRAGIKVQVTRTKVPKVRAPEVHLKLMIPKDVRQRLVIRPDDFGDTF

SEQ ID NO: 2302 - protein, 540 aa, Artificial Sequence
  Description of Artificial Sequence: Synthetic polypeptide
MLTMSSRKRQPAAERAAYNIDAEWTEADLALLQELEEAEARLPLDAPRALLSVRLSVFTDDTTSPVRQELDLRQLAREKGLRVIGVASDLNVSATKVPPWKRKSLGDWLSNRAPEFDALLFWKIDRFIRNLNDLNVMVRWSETYSKNLISKNDPIDLTTTMGKMMVQLLGGVAEIEAANTKTRVESLWDYTKTQGEWLVGKPAYGYMTQRDETGKVVLVIDPQASEALHLARELAIGGMAARVVADELKKRELVTGGLTASTLLRRLRNPALLGYRVEENKETTGMRRSKLLYGRDGKPIRVADPIFTQEEFDSLQAVLDARGKNQPPRHVGGATKFLGVLKCVNCETNMIVHHTRNKHGDYAYLRCQGCKSGGYGSPNPTEVYDRLVEQVLAVLGDFPVETREYARGEEMRKELKRLEESIAYYMKELEPGGRYTKTRFTQDQAEGTLDKLIAELEAIDPESAKDRWVYVAGGKTFREHWEQGGMEAMSLDLLRAGIKVQVTRTKVPKVRAPEVHLKLMIPKDVRQRLVIRPDDFGDTF

SEQ ID NO: 2303 - protein, 538 aa, Artificial Sequence
  Description of Artificial Sequence: Synthetic polypeptide
MREVAEAGTLLSVTTSVLEQLRQQKAGKVELSNAQVEAALPIVGSYGRISDAYEDAETGVTESGVKRQLKVNGLISQARGWQLHDRVYVDNHLSAYKSHVVRDAFEDLLEDLASGVVDGIICYNLDRLARQVKDLERVIAIYDAGRKAGRQMYFATNEGSIDLSSDDGITLARIMVAFANKASRDTARRVALKHQEIRDEGRNVGGGRPFGWDWKFEGNREHVLNPVESAAIREAAEGLIAGTQTFRGVVRDWTERGFTTPRGRHWTPQAVKGVMRSPRLAGWLVHKGQIAVHSRTGGLVRAQAPAILTDEEYEALLVATETTRSRYTAASGRNKYLLSGIVRCAECGARLVGNRRTDKHFYYACRVGGGLNREGGAACGKVTASGFELDLMVEELILPVVIEHTGDAVLNAKKPHQEDLMGLTEERTSWVKRLDEGAAPDVVLPRISKIDQKIEELRHRQAEWLREQRGAAASVGVTEETWPHLSIEEKRNHVSRYIEAIYVSRATRRGNTFDRSRVSSPVWRTTAGRGEPQLSAVQ

SEQ ID NO: 2304 - protein, 537 aa, Artificial Sequence
  Description of Artificial Sequence: Synthetic polypeptide
MKAAIYSRKSKFTGKGESVENQIELCKSYAKNNGYDEFYIYEDEGFSGGNINRPEFKSMMKDAKYKKFDAIICYRLDRISRNVSDFSSLIDELKALSIDFISIREQFDTSSPMGTAMMFISSVFAQLERETIAERIKDNMYELAKTGRWLGGTPPFGFSSEPTYYLDNNSKQKKMMKLSPIDEEISLVRILFEQYLSLGSLGKLQKYLIQNNIKTKRDSNWDIKALQLLLRNPVYVKSSDLVTSYLSTKGATVFGDPNGNGILSYNKKDSKDKYKDISEWILSVSKHEGVIMDNLWIKVQRQLDKNKDLAPRLVNGSEYGVFNSVLQCAKCGGKMIQKQGHTSKKTGEILRYYICTNKINSTETTCDSKNVRLDILEKHVMKELFKATADKGSLIKAIEEYKKSLESEYIDKDNIKTYEKQISQKELQVKNLIDKLSLNPNIFDLLSSRIEELNKELKELKFKKFELENTNSNLKAAIKEIDASTSMILNFKSMWEKADYSMKKLLINSLVDYISYNSDTMEVVIKPFCTNKKKGAL

SEQ ID NO: 2305 - protein, 537 aa, Artificial Sequence
  Description of Artificial Sequence: Synthetic polypeptide
MSSRKRQPAAERAAYNIDAEWTEADLALLQELEEAEARLPLDAPRALLSVRLSVFTDDTTSPVRQELDLRQLAREKGLRVIGVASDLNVSATKVPPWKRKSLGDWLSNRAPEFDALLFWKIDRFIRNLNDLNVMVRWSETYSKNLISKNDPIDLTTTMGKMMVQLLGGVAEIEAANTKTRVESLWDYTKTQGEWLVGKPAYGYMTQRDETGKVVLVIDPQASEALHLARELAIGGMAARVVADELKKRELVTGGLTASTLLRRLRNPALLGYRVEENKETTGMRRSKLLYGRDGKPIRVADPIFTQEEFDSLQAVLDARGKNQPPRHVGGATKFLGVLKCVNCETNMIVHHTRNKHGDYAYLRCQGCKSGGYGSPNPTEVYDRLVEQVLAVLGDFPVETREYARGEEMRKELKRLEESIAYYMKELEPGGRYTKTRFTQDQAEGTLDKLIAELEAIDPESAKDRWVYVAGGKTFREHWEQGGVEAMSLDLLRAGIKVQVTRTKVPKVRAPEVHLKLMIPKDVRQRLVIRPDDFGDTF

SEQ ID NO: 2306 - protein, 536 aa, Artificial Sequence
  Description of Artificial Sequence: Synthetic polypeptide
MNAMTAIEHRPAEITPAEARAAVLALHEHGGNVSATARTLGVTRAKLQRRIRKADMWGISAHGEVMASIPRRIEAAPGRVRRYLLTCAQSNTKVHAEFWRNLLALRDHFGAELMVSRVRYNHNDAQVSQEKDGRAADDSLWYAAEVEPYLADERVEICPTLIWAGDMNIIPTATSPLSGLDSFTGAASCVFPHPQIALKSVATAPGTPHKANYTTGAVTLKRYIKRKAGLKAEFHHAFGALLVEVDGAGDWFARQINATDAGVIYDLDLKVDAGAVTPGHPVEVFTPGDIHGTRVDRAVLAAVWGPGGLVDVLKPRHQILHDVLNFGSRSHHNGFFDSLAIHYGHADGVEDEIRETAAILNATLRPWSQSWVVKSNHDEHLEKWIEVSDFKRDPLNAAFYLSAASAKVEAIRRRDRGFDLLAWALDRAGLEGGVNFLARDGKLLIAGVRHDQHGDLGPNGARGSAANIARTGEKANVGHSHAAAISQGCYQSGTFSDLDMGYNRGPSSWSHSAILTYANGKRAIVTLRAGKWRAEP

SEQ ID NO: 2307 - protein, 536 aa, Artificial Sequence
  Description of Artificial Sequence: Synthetic polypeptide
MNAMTAIEHRPAEITPAEARAAVLALHEHGGNVSATARTLGVTRAKLQRRIRKADMWGISAHGEVMASIPRRIEAAPGRVRRYLLTCAQSNTKVHAEFWRNLLALRDHFGAELMVSRVRYNHNDAQVSQEKDGRAADDSLWYAAEVEPYLADERVEICPTLIWAGDMNIIPTATSPLSGLDSFTGAASCVFPHPQIALKSVATAPGTPHKANYTTGAVTLKRYIKRKAGLKAEFHHAFGALLVEVDGAGDWFARQINATDAGVIYDLDLKVDAGAVTPGHPVEVFTPGDIHGTRVDRAVLAAVWGPGGLVDVLKPRHQILHDVLNFGSRSHHNGFFDSLAIHYGHADGVEDEIRETAAILNTTLRPWSQSWVVKSNHDEHLEKWIEVSDFKRDPLNAAFYLSAASAKVEAIRRRDRGFDLLAWALDRAGLEGGVNFLARDGKLLIAGVRHDQHGDLGPNGARGSAANIARTGEKANVGHSHAAAISQGCYQSGTFSDLDMGYNRGPSSWSHSAILTYANGKRAIVTLRAGKWRAEP

SEQ ID NO: 2308 - protein, 534 aa, Artificial Sequence
  Description of Artificial Sequence: Synthetic polypeptide
MSNEYCMYLRKSRADAEAEARGEEEILSRHERTLLDLSKKLKLHVTKIFREVVSGETISNRPEVQQLLEEVEEGRWAGVLVMEIERLARGDTVDQGIVAQTFKYSSTKIITPTKTYDPDNEFDEEYFEFGLFMSRREYKTINRRQQRGRTASIKEGKYLGSKPPYGYERIKLEGQKGYSLVPNIEQAPIVKFIFELYTKGEPLGNGTYNRLGTSLIARKLNALKVPTAKGGNWVTSTINGILRNPVYMGKIKWGSRPMQKKRKKGELSISRPRVKLEEMTLVDGLHEGLVSEEVWNLAQELLAQNPARPIPTKYKVKNPLMGLVICGECGRKMIRRPYSKKDLPSTLMCQDPQCTNVSSHLHLVEKKIIEGLKTWLINYKAEWKKIKQDDGKSLNTNEIREKAIAKINNQISSLELQMNNLHDLLEQGIYSTEKFIERSKNISERIKKYLVEKEELEKEIKTEEAVQGNNKEIVPVVERVIETYYLTDNPEMRNNLLKSVLVKVIYKKEYGTRWHRDPDDFELTLHPKILQNYY

SEQ ID NO: 2309 - protein, 531 aa, Artificial Sequence
  Description of Artificial Sequence: Synthetic polypeptide
MGVAVMTCVFVVCLVNHRGLSGVRYKPMRALVVIRLSRVTDATTSPERQLESCQQLCAQRGWDVVGVAEDLDVSGAVDPFDRKRRPNLARWLAFEEQPFDVIVAYRVDRLTRSIRHLQQLVHWAEDHKKLVVSATEAHFDTTTPFAAVVIALMGTVAQMELEAIKERNRSAAHFNIRAGKYRGSLPPWGYLPTRVDGEWRLVPDPVQRERVLEVYHRVVDNHEPLHLVAHDLNQRGVLSPKDYFAKLQGREPQGREWSATALKRSLISEAMLGYATLNGKTVRDDDGAPLVRSEPILTREQLEALRAELVKTDRTKPAVSTPSLLLRVLFCSVCGEPAYKFTGGGRKNARYRCRSWGWAQRCGNGTVAMAEWDAFCEEQVLDLLGDAERLEKVWVAGSDSAVELAEVNAELVDLTSLIGSPAYRAGSPQREALDARIAALAARQEELEGLEARPSGWEWRETGQRFGDWWREQDTAAKNTWLRSMNVRLTFDVRGGLTRTIDFGDLQEYEQHLRLGAALYLVNAEKPPTGR

SEQ ID NO: 2310 - protein, 530 aa, Artificial Sequence
  Description of Artificial Sequence: Synthetic polypeptide
MFSVGMAVMTCVFVVCLVNHRGLSGVRYKPMRALVVIRLSRVTDATTSPERQLESCQQLCAQRGWDVVGVAEDLDVSGAVDPFDRRRRPNLARWLAFEEQPFDVIVAYRVDRLTRSIRHLQQLVHWAEDHKKLVVSATEAHFDTTTPFAAVVIALMGTVAQMELEAIKERNRSAAHFNIRAGKYRGSLPPWGYLPTRVDGEWRLVPDPVQRERILEVYHRVVDNHEPLHLVAHDLNRRGVLSPKDYFAKLQGREPRGREWSATALKRSLISEAMLGYATLNGKTVRDDDGAPLVRAEPILTREQLEALRAELVKTDRAKPSVSTPSMLLRVLFCAVCGEPAYKFTGGGRKNARYRCRSWGWAQRCGNGTVAMAEWDSFCEEQVLDLLGDSERLEKVWVAGSDSAVELAEVNAELVDLTSLIGSPAYRVGSPQREALDARIAALAARQEELEGLEARPSGWEWRETGQRFGDWWREQGTAAKNTWLRSMNVRLTFDVRGGLTRTIDFGDLQEYEQHLRLGSVVERLHAGMS

SEQ ID NO: 2311 - protein, 530 aa, Artificial Sequence
  Description of Artificial Sequence: Synthetic polypeptide
MFSVGMAVMTCVFVVCLVNHRGLSGVRYKPMRALVVIRLSRVTDATTSPERQLESCQQLCAQRGWDVVGVAEDLDVSGAVDPFDRRRRPNLARWLAFEEQPFDVIVAYRVDRLTRSIRHLQQLVHWAEDHKKLVVSATEAHFDTTSPFAAVVIALMGTVAQMELEAIKERNRSAAHFNIRAGKYRGSLPPWGYLPTRVDGEWRLVPDPVQRERILEVYHRVVDNHEPLHLVAHDLNRRGVLSPKDYFAKLQGREPQGREWSATALKRSLISEAMLGYATLNGKTVRDDDGAPLVRAEPILTREQLEALRAELVKTDRTKPAVSTPSLLLRVLFCAVCGEPAYKFTGGGRKNARYRCRSWGWAQRCGNGTVAMAEWDAFCEEQVLDLLGDSERLEKVWVVGSDSAVELAEVNAELVDLTSLIGSPAYRVGSPQREALDARIAALAARQEELEGLEARPSGWEWRETGQRFGDWWREQDTSGKNTWLRSMNVRLTFDVRGGLTRTIDFGDLQEYEQHLRLGSVVERLHTGMS

SEQ ID NO: 2312 - protein, 530 aa, Artificial Sequence
  Description of Artificial Sequence: Synthetic polypeptide
MFSVGMAVMTCVFVVCLVNHRGLSGVRYKPMRALVVIRLSRVTDATTSPERQLESCQQLCAQRGWDVVGVAEDLDVSGAVDPFDRGRRPNLARWLAFEEQPFDVIVAYRVDRLTRSIRHLQQLVHWAEDHKKLVVSATEAHFDTTTPFAAVVIALMGTVAQMELEAIKERNRSAAHFNIRAGKYRGSLPPWGYLPTRVDGEWRLVPDPVQRERILEVYHRVVDNHEPLHLVAHDLNRRGVLSPKDYFAKLQGREPQGREWSATALKRSLISEAMLGYATLNGKTVRDDDGAPLVRAEPILTREQLEALRAELVKTDRTKPAVSTPSLLLRVLFCAVCGEPAYKFTGGGRKNARYRCRSWGWAQRCGNGTVAMAEWDAFCEEQVLDLLGDSERLEKVWVVGSDSAVELAEVNAELVDLTSLIGSPAYRVGSPQREALDARIAALAARQEELEGLEARPSGWEWRETGQRFGDWWREQDTSGKNTWLRSMNVRLTFDVRGGLTRTIDFGDLQEYEQHLRLGSVVERLHTGMS

SEQ ID NO: 2313 - protein, 530 aa, Artificial Sequence
  Description of Artificial Sequence: Synthetic polypeptide
MGMAVMTCAFVVCLVNHRGLSGVRYKPMRALVVIRLSRVTDATTSPERQLESCQQLCAQRGWDVVGVAEDLDVSGAVDPFDRKRRPNLARWLAFEEQPFDVIVAYRVDRLTRSIRHLQQLVHWAEDHKKLVVSATEAHFDTTTPFAAVVIALMGTVAQMELEAIKERNRSAAHFNIRAGKYRGSLPPWGYLPTRVDGEWRLVPDPVQRERILEVYHRVVDNHEPLHLVAHDLNRRGVLSPKDYFAKLQGREPQGREWSATALKRSLISEAMLGYATLNGKTVRDDDGAPLVRAEPILTREQLEALRAELVKTSRAKPAVATPSLLLRVLFCAVCGEPAYKFDAGRKIPRYRCRSFGFAVRCGNGTVPIAEWDAFCEEQVLDLLGDSERLEKVWVAGSDSAVELAEVNAELVDLTSLIGSPAYRAGSPQREALDARIAALAARQEELEGLEARPSGWEWRETGQRFGDWWRDQDTAGKNTWLRSMNVRLTFDVRGGLTRTIDFGDLQEYEQHLRLGSALDLVNAEKPPTGR

SEQ ID NO: 2314 - protein, 530 aa, Artificial Sequence
  Description of Artificial Sequence: Synthetic polypeptide
MCFSGYGRDDLCLRGLSGQPPRSQWCTVQTMRALVVIRLSRVTDATTSPERQLESCQQLCAQRGWDVVGVAEDLDVSGAVDPFDRKRRPNLARWLSFEEQPFDVIVAYRVDRLTRSIRHLQQLVHWAEDHKKLIVSATEAHFDTTTPFAAVVIALMGTVAQMELEAIKERNRSAAHFNIRAGKYRGSLPPWGYLPTRVDGEWRLVPDPVQRARILEVYHRVVDNHEPLHLVAHDLNRRGVLSPKDYFAKLQGREPQGREWSATALKRSLISEAMLGYATLNGKTVRDDDGAPLVRAEPILTREQLEALRAELVKTDRTKPAVSTPSLLLRVLFCAVCGEPAYKFAGGGRKHPRYRCRSMGFPKHCGNGTVAMAEWDAFCEEQVLDLLGDSERLEKVWVAGSDSAVELAEVNAELVDLTSLIGSPAYRVGSPQREALDTRIAALAARQEELEGLEARPSGWEWRETGQRFGDWWREQDTAAKNTWLRSMNVRLTFDVRGGLTRTIDFGDLQEYEQHLRLGSVVERLHTGMS

SEQ ID NO: 2315 - protein, 530 aa, Artificial Sequence
  Description of Artificial Sequence: Synthetic polypeptide
MGVAVMTCVFVVCLVNHRGLRGVRYKPMRALVVIRLSRVTDATTSPERQLESCRQLCAQRGWEVVGVAEDLDVSGAVDPFDRKRRPNLARWLAFEEQPFDVIVAYRVDRLTRSIRHLQQLVHWAEDHKKLVVSATEAHFDTTTPFAAVVIALMGTVAQMELESIKERNRSAAHFNIRAGKYRGSLPPWGYLPTRVDGEWRLVPDPVQRERILEVYHRVVDNHEPLHLVAHDLNRRGVLSPKDYFAKLQGREPQGRAWSATALKRSLISEAMLGYTTLNGKTVRDDDGAPLVRAEPILTREQLEALRAELVKTDRTKPAVSTPSLLLRVLFCAVCGEPAYKFDAGRKIPRYRCRSFGFAQRCGNGTIPIAEWDAFCEEQVLDLLGDSERLEKVWVAGSDSAVELAEVNAELVDLTSLIGSPAYRVGSPQREALDARIAALAARQEELEGLEARPSGWEWRETGQRFGDWWRDQDTAGKNTWLRSMNVRLTFDVRGGLTRTIDFGDLQEYEQHLRLGSALDLVNAEKPPTGR

SEQ ID NO: 2316 - protein, 529 aa, Artificial Sequence
  Description of Artificial Sequence: Synthetic polypeptide
MSDRASTYDIEAEWSPADLALLRSLEEAETLLPPDAPRALLSVRLSVFTEDTTSPVRQELDLRQLARDKGMRVVGVASDLNVSATKVPPWKRKELGDWLGNKTPQFDALLFWKIDRFIRNMGDLSRMIEWANRYEKNLISKNDPIDLKTPIGKMMTTLLGGVAEIESANTKARVESLWDYAKTQSDWLVGKPAYGYVTQRDESGKVSLAVDPKAREALHLARELVLGGMAARSVAEELKKREMVTPGLTAATLLRRMRNPALMGYRVEEDKRGGLRRSKLVLGHDGKPIRVADPVFTEEEFETLQAVLDSRGKNQPPRQPSGATKFLGVLKCVDCRSNMIVHFTRNKHGEYAYLRCQKCKSGGLGAPHPQEVYDALVEQVLAVLGDFPVERREYARGEEARAEVKRLEESIAYYMQGLEPGGRYTKTRFTRENAERALDKLIAELEAVDPETTEDRWIYEPIGKTFRQHWEEGGMEAMALDLIRAGITCDVTRTKVPRVRAPQVELDLDIPSDVRERLVMRRDDFAEAF

SEQ ID NO: 2317 - protein, 529 aa, Artificial Sequence
  Description of Artificial Sequence: Synthetic polypeptide
MSNRLHEYDVEAEWSPADLALLRSLEEAESLLPESAPRALLSVRLSVFTEDTTSPVRQELDLRQLARDKGMRVVGVASDLNVSATKVPPWKRKSLGTWLNDRVPEFDALLFWKVDRFIRNMSDLSRMIDWSNRYEKNLISKNDPIDLSTPLGKMMVTLLGGIAEIEAANTKARVESLWDYNKTQSEWLVGKPPYGYTTARDEQGKNRLVIDPKASEALHLTRLHLLEGGSVRSFVPVLKEKGLVSTGLTPSTLIRRLRNPALLGYRVEEDKKGGLRRSKVVVGHDGQPIVIADPIFTREEWDTLQAAMDARNKNQPPRQPSGATKFRGVLKCVECGTNMIVHHTRNKHGEYAYLRCQGCQSGGLGSPHPQDVYDALVGQVLTVLGDWPVQTREYARGAEARAETKRLEETIAVYMKGLEPGGRYTKTRFTMEQAEATLDKLIAELEAIDPDTTTDRWVYVAGGKTFREHWEEGGMDAMTSDLLRAGITATVTRTKIPKVRAPKVELDLDIPKDVRERLIVREDDFAETF

SEQ ID NO: 2318 - protein, 528 aa, Artificial Sequence
  Description of Artificial Sequence: Synthetic polypeptide
MTSSVLEQLRQAKSGAPKLSNAQVEAVLPVVGSYARISDAYEDAETGVTEQGTTRQRKVNKLLAEARGWQLHDREYVDNNLSAFKTHVVRDAFEDLLEDLASGVIDGIICYNLDRLARQVKDLERVIEIYDAGRKSGREMFFATNEGSIDLSSDDGITLARVMVAFANKASRDTARRVALKHQEIRDEGRNVGGSRPFGWDWKMEGSREHVLNPVESEAIRAAATGLIDGSMNYRSIVRDWNEQGLRTPRGREWSPQAVKAVMKNPRLAGWLVHKGSIAVHSRTGELVRAQAPAILTDEEYEALLTATEATRSRYTAASGRNRYLLSGIVRCAECGARLVGNRRTDKHFYYACRVGGDRASDGKSNACGKVTASGFELDRMVEELVVPMIIEASASLVQNAEKPHQAELVGLQDERDKLLQMYREGQAPSDAALPRLAELDQKVAELRHKQAEWLRSQKAAERGVEVTEETWPGLSIEEKRGHVAELIEAIYVSRATRRGNTFDRTRVSTPVWRKRGDVAGSTPSAAE

SEQ ID NO: 2319 - protein, 527 aa, Artificial Sequence
  Description of Artificial Sequence: Synthetic polypeptide
MGMAVMTCVFVVCLVNHRGLSGVRYKPMRALVVIRLSRVTDATTSPERQLESCQQLCAQRGWDVVGVAEDLDVSGAVDPFDRKRRPNLARWLAFEEQPFDVIVAYRVDRLTRSIRHLQQLVHWAEDHKKLVVSATEAHFDTTTPFAAVVIALMGTVAQMELEAIKERNRSAAHFNIRAGKYRGSLPPWGYLPTRVDGEWRLVPDPVQRERILEVYHRVVDNHEPLHLVAHDLNRRGVLSPKDYFAKLQGREPRGREWSATALKRSLISEAMLGYATLNGKTVRDDDGAPLVRAEPILTREQLEALRAELVKTDRTKPAVSTPSLLLRVLFCAVCGEPAYKFTGGGRKNARYRCRSWGWAQRCGNGTVAMAEWDAFCEEQVLDLLGDAERLEKVWVAGSDSAVELAEVNAELVDLTSLIGSPAYRVGSPQREALDARIAALAARQEELEGLEARPSGWEWRETGQRFGDWWREQDIAAKNTWLRSMNVRLTFDVRGGLTRTIDFGDLQEYEQHLRLGSVVEQLHAGMS

SEQ ID NO: 2320 - protein, 527 aa, Artificial Sequence
  Description of Artificial Sequence: Synthetic polypeptide
MGMAVMTCVFVVCLVNHRGLSGVRYKPMRALVVIRLSRVTDATTSPERQLESCQQLCAQRGWDVVGVAEDLDVSGAVDPFDRKRRPNLARWLAFEEQPFDVIVAYRVDRLTRSIRHLQQLVHWAEDHKKLVVSATEAHFDTTTPFAAVVIALMGTVAQMELEAIKERNRSAAHFNIRAGKYRGSLPPWGYLPTRVDGEWRLVPDPVQRERILEVYHRVVDNHEPLHLVAHDLNRRGVLSPKDYFAKLQGREPQGREWSATALKRSLISEAMLGYATLNGKTVRDDDGAPLVRAEPILTREQLEALRAELVKTDRTKPAVSAPSLLLRVLFCAVCGEPAYKFTGGGRKNARYRCRSWGWAQRCGNGTVAMAEWDAFCEEQVLDLLGDAERLEKVWVAGSDSAVELAEVNAELVDLTSLIGSPAYRAGSPQREALDARIAALAARQEELEARELRPSGWEWRETGQRFGDWWREQDTSGKNTWLRSMNVRLTFDVRGGLARTIDFGDLQEYEQHLRLGSVVEQLHTGMS

SEQ ID NO: 2321 - protein, 527 aa, Artificial Sequence
  Description of Artificial Sequence: Synthetic polypeptide
MGMAVMTCVFVVCLVNHRGLSGVRYKPMRALVVIRLSRVTDATTSPERQLESCQQLCTQRGWDVVGVAEDLDVSGAVDPFDRKRRPNLARWLAFEEQPFDVIVAYRVDRLTRSIRHLQQLVHWAEDHKKLIVSATEAHFDTTSPFAAVVIALMGTVAQMELEAIKERNRSAAHFNIRAGKYRGSLPPWGYMPARVDGEWRLLVDPVQRERILEVYHRVVDNHEPLHLVAHDLNQRGILSPKDYFAQLQGREPQGRAWSATALKRSLISEAMLGYTTLNGKTVRDDDGAPLVRAEPILTREQLEALRAELVKTDRTKPAVSTPSLLLRVLFCAVCGEPAYKFAGGGRKHPRYRCRSMGFPKHCGNGTVAMAEWDAFCEEQVLDLLGDAERLEKVWVAGSDAAVELAELNAELVDLTSLIGSPAYRAGSPQREALDARIEALAARQEELEARELRPSGWEWRETGQRFADWWAAQDVAGKNAWLRSMNVRLTFDVRGGLTRTIDFGDLQEYEQHLRLGSVVEQLHTGMS

SEQ ID NO: 2322 - protein, 527 aa, Artificial Sequence
  Description of Artificial Sequence: Synthetic polypeptide
MGMAVMTCVFVVCLVNHRGLSGVRYKPMRALVVIRLSRVTDATTSPERQLESCQQLCAQRGWDVVGVAEDLDVSGAVDPFDRKRRPNLARWLAFEEQPFDVIVAYRVDRLTRSIRHLQQLVHWAEDHKKLVVSATEAHFDTTTPFAAVVIALMGTVAQMELEAIKERNRSAAHFNIRAGKYRGSLPPWGYLPTRVDGEWRLVPDPVQRERILEVYHRVVDNHEPLHLVAHDLNRRGVLSPKDYFAKLQGREPQGREWSATALKRSLISEAMLGYATLNGKTVRDDDGAPLVRAEPILTREQLEALRAELVKTDRTKPAVSTPSLLLRVLFCAVCGEPAYKFTGGGRKNARYRCRSWGWVQRCGNGTVAMAEWDAFCEEQVLDLLGDSERLEKVWVAGSDSAVELAEVNAELVDLTSLIGSPAYRVGSPQREALDARIAALAARQEELEGLEARPSGWEWRETGQRFADWWREQDTAAKNTWLRSMNVRLTFDVRGGLTRTIDFGDLQEYEQHLRLGSVVERLHTGMS

SEQ ID NO: 2323 - protein, 527 aa, Artificial Sequence
  Description of Artificial Sequence: Synthetic polypeptide
MGMAVMTCVFVVCLVNHRGLSGVRYKPMRALVVIRLSRVTDATTSPERQLESCQQLCAQRGWDVVGVAEDLDVSGAVDPFDRKRRPNLARWLAFEEQPFDVIVAYRVDRLTRSIRHLQQLVHWAEDHKKLVVSATEAHFDTTTPFAAVVIALMGTVAQMELEAIKERNRSAAHFNIRAGKYRGSLPPWGYLPTRVDGEWRLVPDPVQRERILEVYHRVVDNHEPLHQIAHDLNQRGILSPKDYFAQLQGREPQGREWSATALKRSLISEAMLGYATLNGKTVRDDDGAPLVRAEPILTREQLESLRAELVKADRAKPAVSTPSLLLRVLFCAVCGEPAYKFTGGGRKNARYRCRSWGWAQRCGNGTVAMAEWDAFCEEQVLDLLGDAERLEKVWVAGSDSAVELAEVNAELVDLTSLIGSPAYRVGSPQREALDARIAALAARQEELEGLEARPSGWEWRETGQRFGDWWREQDIAAKNTWLRSMNVRLTFDVRGGLTRTIDFGDLQEYEQHLRLGSVVERLHAGMS

SEQ ID NO: 2324 - protein, 527 aa, Artificial Sequence
  Description of Artificial Sequence: Synthetic polypeptide
MGMAVMTCVFVVCLVNHRGLSGVRYKPMRALVVIRLSRVTDATTSPERQLESCQQLCAQRGWEVVGVAEDLDVSGAVDPFDRKRRPNLARWLASEEQPFDVIVAYRVDRLTRSIRHLQQLVHWAEDHKKLVVSATEAHFDTTTPFAAVVIALMGTVAQMELEAIKERNRSAAHFNIRAGKYRGSLPPWGYLPTRVDGEWRLVPDPVQRERILEVYHRVVDNHEPLHLVAHDLNRRGVLSPKDYFAKLQGREPQGREWSATALKRSLISEAMLGYATLNGKTVRDDDGAPLVRSEPILTREQLEALRAELVKTDRIKPAVSTPSMLLRVLFCAVCGEPAYKFAGGGRKHPRYRCRSMGFPKHCGNGTVAMAEWDAFCEEQVLDLLGDAERLEKVWVAGSDSAVELAEVNAELVDLTSLIGSPAYRAGSPQREALDARIAALAARQEELEGLEARPSGWEWRETGQRFGDWWREQDTAGKNTWLRSMNVRLTFDVRGGLTRTIDFGDLQEYEQHLRLGSVVERLHTGMS

SEQ ID NO: 2325 - protein, 527 aa, Artificial Sequence
  Description of Artificial Sequence: Synthetic polypeptide
MGVSVMTCVFVVCLVNHRGLSGVRYKPMRALVVIRLSRVTDATTSPERQLESCQQLCAQRGWEVVGVAEDLDVSGAVDPFDRKRRPNLARWLAFEEQPFDVIVAYRVDRLTRSIRHLQQLVHWAEDHKKLVVSATEAHFDTTTPFAAVVIALMGTVAQMELEAIKERNRSAAHFNIRAGKYRGSLPPWGYLPTRVDGEWRLVPDPVQRERILEVYHRVVDNHEPLHLVAHDLNRRGVLSPKDYFAKLQGREPQGREWSATALKRSLISEAMLGYATLNGKTVRDDDGAPLVRAEPILTREQLEALRAELVKTDRTKPAVSTPSLLLRVLFCAVCGEPAYKFAGGGRKHPRYRCRSMGFPKHCGNGTVAMAEWDAFCEEQVLDLLGDAERLEKVWVAGSDSAVELAEVNAELVDLTSLIGSPAYRVGSPQREALDARIAALAARQEELEGLEARPSGWEWRETGQRFGDWWREQDTAAKNTWLRSMNVRLTFDVRGGLTRTIDFGDLQEYEQHLRLGSVVEQLHAGMS

SEQ ID NO: 2326 - protein, 527 aa, Artificial Sequence
  Description of Artificial Sequence: Synthetic polypeptide
MGVAVMTCVFVVCLVNHRGLSGVRYKPMRALVVIRLSRVTDATTSPERQLESCQQLCAQRGWDVVGVAEDLDVSGAVDPFDRKRRPNLARWLAFEEQPFDVIVAYRVDRLTRSIRHLQQLVHWAEDHKKLVVSATEAHFDTTTPFAAVVIALMGTVAQMELEAIKERNRSAAHFNIRAGKYRGSLPPWGYLPTRVDGEWRLVPDPVQRERILEVYHRVVDNHEPLHLVAHDLNRRGVLSPKDYFAKLQGREPQGREWSATALKRSLISEAMLGYATLNGKTVRDDDGAPLVRAEPILTREQLEALRAELVKTDRTKPAVATPSLLLRVLFCAVCGEPAYKFTGGGRKNARYRCRSWGWAQRCGNGTVAMAEWDAFCEEQVLDLLGDAERLEKVWVAGSDSAVELAEVNAELVDLTSLIGSPAYRVGSPQREALDARIAALAARQEELEGLEARPSGWEWRETGQRFGDWWQEQDIAAKNTWLRSMNVRLTFDVRGGLTRTIDFGDLQEYEQHLRLGSVVERLHTGMS

SEQ ID NO: 2327 - protein, 527 aa, Artificial Sequence
  Description of Artificial Sequence: Synthetic polypeptide
MGVAVMTCVFVVCLVNHRGLSGVRYKPMRALVVIRLSRVTDATTSPERQLESCRQLCAQRGWGVVGVAEDLDVSGAVDPFDRKRRPNLARWLAFEEQPFDVIVAYRVDRLTRSIRHLQQLVHWAEDHKKLVVSATEAHFDTTTPFAAVVIALMGTVAQMELEAIKERNRSAAHFNIRAGKYRGSLPPWGYLPTRVDGDWRLVPDPVQRERILEVYHRVVDNHEPLHLVAHDLNRRGVLSPKDYFAKLQGREPQGREWSATALKRSLISEAMLGYATLNGKTVRDDDGAPLVRAEPILTREQLEALRAELVKTDRTKPAVATPSLLLRVLFCAVCGEPAYKFTGGGRKNARYRCRSWGWAQRCGNGTVAMAEWDAFCEEQVLDLLGDAERLEKVWVAGSDSAVELAEVNAELVDLTSLIGSPAYRVGSPQREALDARIAALAARQEELEGLEARPSGWEWRETGQRFGDWWREQDTAAKNTWLRSMNVRLTFDVRGGLTRTIDFGDLQEYEQHLRLGSVVERLHAGMS

SEQ ID NO: 2328 - protein, 527 aa, Artificial Sequence
  Description of Artificial Sequence: Synthetic polypeptide
MGMAVMTCVFVVCLVNHRGLSGVRYKPMRALVVIRLSRVTDATTSPERQLESCQQLCAQRGWDVVGVAEDLDVSGAVDPFDRKRRPNLARWLAFEEQPFDVIVAYRVDRLTRSIRHLQQLVHWAEDHKKLVVSATEAHFDTTTPFAAVVIALMGTVAQMELEAIKERNRSAAHFNIRAGKYRGSLPPWGYLPTRVDGEWRLVPDPVQRERILEVYHRVVDNHEPLHLVAHDLNRRGVLSPKDYFAKLQGREPRGREWSATALKRSLISEAMLGYATLNGKTVRDDDGAPLVRSEPILTREQLEALRAELVKADRTKPAVSTPSLLLRVLFCAVCGEPAYKFAGGQRKNPRYRCRSMGFPKHCGNGTVAMAEWDAFCEEQVLDLLGDAERLEKVWVAGSDSAVELAEVNAELVDLTSLIGSPAYRVGSPQREALDARIAALAARQEELEGLEARPSGWEWRETGQRFGDWWREQDASGKNTWLRSMNVRLTFDVRGGLTRTIDFGDLQEYEQHLRLGSVVERLHTGMS

SEQ ID NO: 2329 - protein, 527 aa, Artificial Sequence
  Description of Artificial Sequence: Synthetic polypeptide
MGMAVMTCVFVVCLVNHRGLSGVRYKPMRALVVIRLSRVTDATTSPERQLESCRQLCAQRGWDVVGVAEDLDVSGAVDPFDRKRRPNLARWLAFEEQPFDVIVAYRVDRLTRSIRHLQQLVHWAEDHKKLVVSATEAHFDTTTPFAAVVIALMGTVAQMELEAIKERNRSAAHFNIRAGKYRGSLPPWGYLPTRVDGEWRLVPDPVQRERILEVYHRVVDNHEPLHLVAHDLNRRGVLSPKDYFAKLQGREPQGREWSATALKRSLISEAMLGYATLNGKTVRDDDGAPLVRAEPILTREQLEALRAELVKTDRTKPAVSTPSLLLRVLFCAVCGEPAYKFAGGGRKHPRYRCRSMGFPKHCGNGTVAMAEWDAFCEEQVLDLLGDSERLEKVWVAGSDSAVELAEVNAELVDLTSLIGSPAYRVGSPQREALDARIAALAARQEELEGLEARPSGWEWRETGQRFGDWWQEQDTAAKNTWLRSMNVRLTFDVRGGLTRTIDFGDLQEYEQHLRLGSVVEQLHTGMS

SEQ ID NO: 2330 - protein, 527 aa, Artificial Sequence
  Description of Artificial Sequence: Synthetic polypeptide
MGVAVMTCVFVVCPVNHRGLSGVRYKPMRALVVIRLSRVTDATTSPERQLEACQQLCAQRGWDVVGVAEDLDVSGAVDPFDRKRRPNLARWLAFEEQPFDVIVAYRVDRLTRSIRHLQQLVHWAEDHKKLVVSATEAHFDTTTPFAAVVIALMGTVAQMELEAIKERNRSAAHFNIRAGKYRGSLPPWGYLPTRVDGEWRLVPDPVQRERILEVYHRVVDNHEPLHLVAHDLNRRGVLSPKDYFAKLQGREPQGREWSATALKRSLISEAMLGYATLNGKTVRDDDGAPLVRSEPILTREQLEALRAELVKTDRTKPAVSTPSLLLRVLFCAVCGEPAYKFAGGGRKHPRYRCRSMGFPKHCGNGTVAMAEWDAFCEEQVLDLLGDAERLEKVWVAGSDSAVELAEVNAELVDLTSLIGSPAYRVGSPQREALDARIAALAARQEELEGLEARPSGWEWRETGQRFGDWWREQDAAAKNTWLRSMNVRLTFDVRGGLTRTIDFGDLQEYEQHLRLGSVVERLHAGMS

SEQ ID NO: 2331 - protein, 526 aa, Artificial Sequence
  Description of Artificial Sequence: Synthetic polypeptide
MTSSVLDQLRQAKTGPAPKENAEAALSLPVVGSYARISDAYEDAETGVTDTGTTRQRKVNKLLAEARGWQLHDREYVDNNLSAYKSHVVRDDFEDLLEDLAAGVVDGIICYNLDRLARQVKDLERVIEIYDAGRKAGRSMYFATNEGSIDLSSDDGITLARVMVAFANKASRDTARRVGLKHQEMRDEGRNVGGGRPFGWDWQFEGSRQHVLNPVESEAIRQAAAGLTDGSKTWSGIQREWNEAGFTTPRGRPWTPQAIKGVLRSPRLAGWLVHKGGIAVHSRTGELIRAQAPAILTDEEYEALLVATEATRSRYTNASGRQRYLLSGIARCAECGGALVGNRRTDKHWYYACRTSNGHTPDGRIPCGGVTCSGYELDRMIEELVLPMIVEGTGGASLNAEKPHQRELAGLRDERKTWVKRLDDGSAPDIVLPRISRIDQRIEELRHKQAEWLREQRVRERHVGVTNETWPHLSTEEKRGHIADLIEAIYVSRATRRGNTFDRSRVSTPVWRATADASASTDAGSR

SEQ ID NO: 2332 - protein, 525 aa, Artificial Sequence
  Description of Artificial Sequence: Synthetic polypeptide
MSARDYDIEAEWTPADLALLKELEEAEALLPADAPRALLSVRLSVFTDDTTSPVRQELDLRQLAREKGYRVVGLASDLNVSATKVPPWKRKSLGDWLNNRAPEFDALLFWKIDRFIRNLNDLNVMIRWSETYSKNLISKNDPIDLTTTMGKMMVSLLGGVAEIEAANTKTRVESLWDYTKTQGEWHVGKPPFGYKTGRDAAGKVVLVEDPPAVETLHTARELVMSGMSTTAAAKELKERGLISSTTATLTRRLRNPGILGLRVEEDKDGGIRRSKLILGRDGQPIRIADPIFTEEQFEELQAVLDKRGKRQPHRQPGGATSFLGVLKCAECGTNMINHFTRNRHGDYAYLRCQGCKSGGCGAPNPQEVYDRLVEQVLAVLGDFPVEMREYARGEEKRKELKRLEESIAYYMKELEPGGRFTKTRFTQDQAEGTLDKLIAELEAIDPESAKDRWVYVAGGKTFREHWEEGGIDAMSADLIRAGIRCQVTRTKVPKVRAPQVHLKLMIPKDVRTRLVIRPDDFGQTF

SEQ ID NO: 2333 - protein, 525 aa, Artificial Sequence
  Description of Artificial Sequence: Synthetic polypeptide
MSARDYDIEAEWTPADLALLKELEEAEALLPADAPRALLSVRLSVFTDDTTSPVRQELDLRQLAREKGHRVVGLASDLNVSATKVPPWKRKSLGDWLNNRAPEFDALLFWKIDRFIRNLNDLNVMIRWSETYSKNLISKNDPIDLTTTMGKMMVSLLGGVAEIEAANTKTRVESLWDYTKTQGEWHVGKPPFGYRTGRDDSGKVVLVEDPLAVETLHTARELVMTGMSTTAAAKELKERGLISSTTATLTRRLRNPGILGLRVEEDKDGGIRRSKLILGRDGQPIRIADPIFTEEQFEELQAVLDKRGKRQPHRQPGGATSFLGVLKCAECGTNMINHFTRNRHGDYAYLRCQGCKSGGYGAPNPQEVYDRLVEQVLAVLGDFPVEMREYARGEEKRKELKRLEESIAYYMKELEPGGRFTKTRFTQDQAEGTLDKLIAELEAIDPESAKDRWVYVAGGKTFREHWEEGGIDAMSADLIRAGIRCQVTRTKVPKVRAPQVHLKLMIPKDVRTRLVIRPDDFGQTF

SEQ ID NO: 2334 - protein, 525 aa, Artificial Sequence
  Description of Artificial Sequence: Synthetic polypeptide
MSARDYDIEAEWTPADLALLKELEEAEALLPADAPRALLSVRLSVFTDDTTSPVRQELDLRQLAREKGHRVVGLASDLNVSATKVPPWKRKSLGDWLNNRAPEFDALLFWKIDRFIRNLNDLNVMIRWSETYSKNLISKNDPIDLTTTMGKMMVSLLGGVAEIEAANTKTRVESLWDYTKTQGEWHVGKPPFGYKTARDEAGKVVLVEDPLAVETLHTARELVMTGMSTTAVAKVLKERGLISSTTATLTRRLRNPGILGLRVEEDKDGGIRRSKLILGRDGQPIRIADPIFTEEQFEELQAVLDKRGKRQPHRQPGGATSFLGVLKCAVCETNMINHYTRNRHGDYAYLRCQGCKSGGCGAPNPQEVYDRLVEQVLAVLGDFPVEMREYARGEEKRKELKRLEESIAYYMKELEPGGRFTKTRFTQDQAEGTLDKLIAELEAIDPDSAKDRWVYVAGGKTFREHWEEGGIDAMSADLIRAGIQCQVTRTKVPKVRAPQVHLKLMIPKDVRTRLVIRPDDFGQTF

SEQ ID NO: 2335 - protein, 525 aa, Artificial Sequence
  Description of Artificial Sequence: Synthetic polypeptide
MSARDYDIEAEWTPADLALLKELEEAEALLPADAPRALLSVRLSVFTDDTTSPVRQELDLRQLAREKGHRVVGLASDLNVSATKVPPWKRKSLGDWLNNRAPEFDALLFWKIDRFIRNLNDLNVMIRWSETYSKNLISKNDPIDLTTTMGKMMVSLLGGVAEIEAANTKTRVESLWDYTKTQGEWHVGKPPFGYKTGRDDSGKVVLVEDPLAVETLHTARELVMTGMSTTAAAKELKERGLISSTTATLTRRLRNPGILGLRVEEDKDGGIRRSKLILGRDGQPIRIADPIFTEEQFEELQAVLDKRGKRQPHRQPGGATSFLGVLKCAECGTNMINHFTRNRHGDYAYLRCQGCKSGGYGAPNPQEVYDRLVEQVLAVLGDFPVEMREYARGEEKRKELKRLEESIAYYMKELEPGGRFTKTRFTQEQAEGTLDKLIAELEAIDPESAKDRWVYVAGGKTFREHWEEGGIDAMSADLIRAGIRCQVTRTKVPKVRAPQVHLKLMIPKDVRTRLVIRPDDFGQTF

SEQ ID NO: 2336 - protein, 525 aa, Artificial Sequence
  Description of Artificial Sequence: Synthetic polypeptide
MGARDYDIEAEWTPADLALLRELEEAESRLPSDAPRALLSVRLSVFTDDTTSPVRQELDLRQLAREKGLRVVGLASDLNVSATKVPPWKRKSLGDWLNNRAPEFDALLFWKIDRFIRNLNDLNVMIRWSETYSKNLISKNDPIDLTTTMGKMMVSLLGGVAEIEAANTKTRVESLWDYTKTQGEWHVGKPPFGYKTARDEAGKVVLVEDPVAVETLHTARELVMTGMSTTAAAKVLKERGLISSTTATLTRRLRNPGVLGLRVEEDKDGGIRRSKLILGRDGKPIRIADPIFTEEQFDELQAVLDKRGKRQPHRQPGGATSFLGVLKCAECGTNMINHFTRNRHGDYAYLRCQGCKSGGYGAPNPQEVYDRLVEQVLAVLGDFPVEMREYARGEEKRKELKRLEESIAYYMKELEPGGRFDKTRFTRDQAEGTLDKLIAELEAIDPESAKDRWVYVAGGKTFREHWEEGGIDAMSADLNRAGIQCQVTRTKIPKVRAPQVHLKLMIPKDVRTRLVIRPDDFGQTF

SEQ ID NO: 2337 - protein, 525 aa, Artificial Sequence
  Description of Artificial Sequence: Synthetic polypeptide
MAVMTCVFVVCLVNHRGLSGVRYKPMRALVVIRLSRVTDATTSPERQLESCQQLCAQRGWDVVGVAEDLDVSGAVDPFDRKRRPNLARWLAFEEQPFDVIVAYRVDRLTRSIRHLQQLVHWAEDHKKLIVSATEAHFDTTTPFAAVVIALMGTVAQMELEAIKERNRSAAHFNIRAGKYRGSLPPWGYMPARVDGEWRLLVDPVQRERILEVYHRVVDNHEPLHLVAHDLNQRGILSPKDYFAKLQGREPKGREWSATALKRSLISEAMLGYTTLNGKTVRDDDGAPLVRAEPILTREQLESLRAELVKTDRTKPAVSTPSLLLRVLFCAVCGEPAYKFTGGGRKNARYRCRSWGWAQRCGNGTVAMAEWDAFCEEQVLDLLGDAERLEKVWVAGSDAAVELTELNAELVDLTSLIGSPAYRAGSPQREALDARIAALAARQEELEGLEARPSGWEWRETGQRFGDWWRDQDTAGKNTWLRSMNVRLTFDVRGGLTRTIDFGDLQEYEQHLRLGSVVEQLHTGMS

SEQ ID NO: 2338 - protein, 524 aa, Artificial Sequence
  Description of Artificial Sequence: Synthetic polypeptide
MIKNLENIHHVAIYLRISQEKKGENVETLENHRQILIEFCEEHGFTYEEFGEVISGGKSEITQRVALKRLLDNIEKYDAIACFELTRISRNGLISQTVKQYCIDYDKPILTPYQSYDLANSETDRLLFDVGSMISSHEHSTIGKRSKANKMQMSKAGLHVSGNVPFGYKRNNETKKLEIDEEAAPTIRYIFQLHSEGYGSFKIRDILNNEGYKSATGKAFNLPSIKRIIRNPAYKGTLIFNNRKKIKRNGKFEYDNVETITVENAHPAIIPPDVWDKANQDRESRALKSISIREKPATKSGVTLLKDLIFCGVCGRKMIIRKDTKSSIGYTLKKCEYLLPNGEKCPNCGKKLDAVIARVLTGLIKYADDLSQMEERLRKNNASDLNEKNQLKLNQIDKAIMEIEQKQKNLIELAMEGLFSHEEIREKKQELVKRMDELKAKREEVVNSINALSVEEEIELIQEKRKLILSLREDMDQEYGNELLKRFIKKIHFTRVIPEDILKRSTRNSERQNYPFNIKFEFFD

SEQ ID NO: 2339 - protein, 523 aa, Artificial Sequence
  Description of Artificial Sequence: Synthetic polypeptide
MTRPTNLDVIIHLRKSRKDIEEEKKALETGVPFDTLDKHKRELMELVRREQHNVIRIFEEIVSGEFLSERPEAQEMLRNVEDGECDAVIVMDLDRLGRGDMIDAGTIFRAFKYSETLIITPTEVIDCNAEGAELLFGVKSIIAREELKQINKRLQGGRRRAVKDGRHIAKKPPYGYLRDENLKLYPHPEEAPVVKKIFELLAEGSGRYKVIDYLMRSGYKAPSNKDIWEQSTISYIVKNEVYLGHLVWGKQKHTKRNGKRVRKNLPPELWTRHDNAHEPIVSQELFDRANEAHTGRLRVSRKEGTAITNPLAGIAKCGVCGRTLTQTHSYDRPNPQIRCNNPACKSIQKGSLTYLFEEKLISSLEELVEQRKMTQSELNNSAERKNKNEERILALTNYIQKATTELNEQHSMRETTFEMLERKVYTEELFLQRHKIISDKIKQLESEIEKSQEEIAQLKIRMRMQAQLIPKIHKVIQAYKSLEDAEQKNNLLKSVIEKVMYIRKKEWLKPEQFELEVILRFPT

SEQ ID NO: 2340 - protein, 523 aa, Artificial Sequence
  Description of Artificial Sequence: Synthetic polypeptide
MMTCVFVVCLVNHRGLSGVRYKPMRALVVIRLSRVTDATTSPERQLESCQQLCAQRGWDVVGVAEDLDVSGAVDPFDRKRRPNLARWLAFEEQPFDVIVAYRVDRLTRSIRHLQQLVHWAEDHKKLVVSATEAHFDTTSPFAAVVIALMGTVAQMELEAIKERNRSAAHFNIRAGKYRGSLPPWGYMPTRVEGEWRLVPDPVQRERILEVYHRVVDNHEPLHLVAHDLNRRGVLSPKDYFAKLQGREPQGREWSATALKRSLISEAMLGYATLNGKTVRDDDGAPLVRSEPILTREQLESLRAELVKADRAKPAVSTPSLLLRVLFCAVCGEPAYKFTGGGRKNARYRCRSWGWAQRCGNGTVAMAEWDAFCEEQVLDLLGDSERLEKVWVAGSDSAVELAEVNAELVDLTSLIGSPAYRVGSPQREALDARIAALAARQEELEGLEARPSGWEWRETGQRFGDWWRDQDTAAKNTWLRSMNVRLTFDVRGGLTRTIDFGDLQEYEQHLRLGSVVERLHAGMS

SEQ ID NO: 2341 - protein, 523 aa, Artificial Sequence
  Description of Artificial Sequence: Synthetic polypeptide
MMTCVFVVCLVNHRGLSGVRYKPMRALVVIRLSRVTDATTSPERQLESCQQLCAQRGWDVVGVAEDLDVSGAVDPFDRKRRPNLARWLAFEEQPFDVIVAYRVDRLTRSIRHLQQLVHWAEDHKKLVVSATEAHFDTTTPFAAVVIALMGTVAQMELEAIKERNRSAAHFNIRAGKYRGSLPPWGYLPTRVDGEWRLVPDPVQRERILEVYHRVVDNHEPLHLVAHDLNRRGVLSPKDYFAKLQGREPQGREWSATALKRSLISEAMLGYATLNGKTVRDDDGAPLVRAEPILTREQLEALRAELVKTGRTKPAAATPSLLLRVLFCAVCGEPAYKFAGGQRKNPRYRCRSMGFPKHCGNGTVAMAEWDAFCEEQVLDLLGDAERLEKVWVAGSDSAVELAEVNAELVDLTSLIGSPAYRVGSPQREALDARIAALAARQEELEGLEARPSGWEWRETGQRFGDWWREQDISAKNTWLRSMNVRLTFDVRGGLTRTIDFGDLQEYEQHLRLGSVVEQLHAGMS

SEQ ID NO: 2342 - protein, 523 aa, Artificial Sequence
  Description of Artificial Sequence: Synthetic polypeptide
MNENVTLIPARIRAGNRITRQENKPKLRVAAYCRVSTDSDEQAGSYDVQVKHYTEYIGRNKEWELAGIYADDGISGTNIKKREGFIEMIDDCMEGKVDMIITKSISRFARNTIDCLKYVRKLKEKNIAIIFEKENINTLEASGELLLTIMASLAQQESASLSQNIKLGLQFRYQEGKVQPNHEHFLGYTKDEDGKLIVDENEAKIVRRIFREYLEGASFRDIANGLEKDKIRTGGKRYKWHLSTIRGILRNEKYMGDALLQKTITTDFIEKIRIKNDGTVPQYYVKDSQEPIIARDIFMLVQEEMIRRANLTSGVDGKKKRVYSSKYALSSICTCTKCGDIYRRIAWNNRGKKSTVWRCCTRVEHGPSACNALTIQESELQDATVKAINKILICSDRMLQILSDNIEMAIADDNSVEMEKLNGILKGKQKELVKLAHAKKDYTALADEIDILRDKKKELQVQRAETEGVKKRIEELTDFLKGENHQLIEYDECMVRKYIEEIKVYEDKFTICFKAKVEIEVVR

SEQ ID NO: 2343 - protein, 523 aa, Artificial Sequence
  Description of Artificial Sequence: Synthetic polypeptide
MNLAKNITMIPTRRMVGTQKPAEKTQKLRVAAYARVSTEFEEQESSYDVQVEHYTTYIKSNPEWELVEIYADDGISATSTTKREAFNRMIQDAKDGKIDMILTKSISRFSRNTVDCLKYTRELKALNIAVFFEKENINTLDAKGEVLMTIMAALAQQESESLSANVRLGNQFRNQQGKVQINHNRFLGYTKDEEGNLVIVPEEAKIVRRIYAEYMDGSSFLQIKRSLEKDGILNGAHNKKWHESNIRQILTNEKYIGDALLQKTFTLNTLEKKRVANNGIAPKYYVEGSHEAIIDRDVFLRVQAEISRRANILNGGKKRIYSSKYALSSMVFCGHCGDIFRRIKWNNRGCKSTVWRCVSRVLKKTSRIDCPARTIREEDLQAAVLTAINDTFNKKDEIIPTLMEIIQDVIDENSQESVEQLDIKIKDLQIRLLEVGKEQKMIDEIGEEIIALRKEKHDIMTEAAKNIELQERINDMFSFLQEQTQAITEYSDTLVRRLIEKITIYDNKAVVEFKSGLQSEVEI

SEQ ID NO: 2344 - protein, 522 aa, Artificial Sequence
  Description of Artificial Sequence: Synthetic polypeptide
MAQPLRALVGARVSVVQGPQKVSHIAQQETGAKWVAEQGHTVVGSFKDLDVSATVSPFERPDLGPWLSPELEGEWDILVFSKIDRMFRSTRDCVKFAEWAEAHGKILVFAEDSMTLNYRDKDRSGSLESMMSELFIYIGSFFAQLELNRFKSRARDSHRVLRGMDRWASGVPPLGFRIVDHPSGKGKGLDTDPEGKAILEDMAAKLLDGWSFIRIAQDLNQRKVLTNMDKAKIAKGKPPHPNPWTVNTVIESLTSPRTQGIKMTKHGTRGGSKIGTTVLDAEGNPIRLAPPTFDPATWKQIQEAAARRQGNRRSKTYTANPMLGVGYCGACGASLAQQFTHRKLADGTEVTYRTYRCGRTPLNCNGISMRGDEADGLLEQLFLEQYGSQPVTEKVFVPGEDHSEELEQVRATIDRLRRESDAGLIATAEDERIYFERMKSLIDRRTRLEAQPRRASGWVTQETDKTNADEWAKASTPDERRRLLMKQGIRFELVRGKPDPEVRLFTPGEIPEGEPLPEPSPR

SEQ ID NO: 2345 - protein, 522 aa, Artificial Sequence
  Description of Artificial Sequence: Synthetic polypeptide
MTCVFVVCLVNHRGLSGVRYKPMRALVVIRLSRVTDATTSPERQLESCQQLCAQRGWDVVGVAEDLDVSGAVDPFDRKRRPNLARWLAFEEQPFDVIVAYRVDRLTRSIRHLQQLVHWAEDHKKLVVSATEAHFDTTTPFAAVVIALMGTVAQMELEAIKERNRSAAHFNIRAGKYRGSLPPWGYLPTRVEGEWRLVPDPVQRERILEVYHRVVDNHEPLHLVAHDLNRRGVLSPKDYFAKLQGREPQGREWSATALKRSLISEAMLGYATLNGKTVRDDDGAPLVRAAPILTREQLEALRAELVKTDRTKPAVSTPSLLLRVLFCAVCGEPAYKFAGGGRKHPRYRCRSMGFPKHCGNGTVAMAEWDAFCEEQVLDLLGDAERLEKVWVAGSDSAVELAEVNAELVDLTSLIGSPAYRVGSPQREALEARIAALATRQEELEGLEARPSGWEWRETGQRFGDWWREQDTAGKNTWLRSMNVRLTFDVRGGLTRTIDFGDLQEYEQHLRLGSVVERLHTGMS

SEQ ID NO: 2346 - protein, 522 aa, Artificial Sequence
  Description of Artificial Sequence: Synthetic polypeptide
MAQPLRALVGARVSVVQGPQKVSHIAQQETGAKWVAEQGHTVVGSFKDLDVSATVSPFERPDLGPWLSPELEGEWDILVFSKIDRMFRSTRDCVKFAEWAEAHGKILVFAEDNMTLNYRDKDRSGSLESMMSELFIYIGSFFAQLELNRFKSRARDSHRVLRGMDRWASGVPPLGFRIVDHPSGKGKGLDTDPEGKAILEDMAAKLLDGWSFIRIAQDLNQRKVLTNMDKAKIAKGKPPHPNPWTVNTVIESLTSPRTQGIKMTKHGTRGGSKIGTTVLDAEGNPIRLAPPTFDPATWKQIQEAAARRQGNRRSKTYTANPMLGVGYCGACGASLAQQFTHRKLADGTEVTYRTYRCGRTPLNCNGISMRGDEADGLLEQLFLEQYGSQPVTEKVFVPGEDHSEELEQVRATIDRLRRESDAGLIATAEDERIYFERMKSLIDRRTRLEAQPRRASGWVTQETDKTNADEWAKASTPDERRRLLMKQGIRFELVRGKPDPEVRLFTPGEIPEGEPLPEPSPR

SEQ ID NO: 2347 - protein, 522 aa, Artificial Sequence
  Description of Artificial Sequence: Synthetic polypeptide
MAQPLRALVGARVSVVQGPQKVSHIAQQETGAKWVAEQGHTVVGSFKDLDVSATVSPFERPDLGPWLSPELEGEWDILVFSKIDRMFRSTRDCVKFAEWAEAHGKILVFAEDNMTLNYRDKDRSGSLESMMSELFIYIGSFFAQLELNRFKSRARDSHRVLRGMDRWASGVPPLGFRIVDHPSGKGKGLDTDPEGKAILEDMAAKLLDGWSFIRIAQDLNQRKVLTNMDKAKIAKGKPPHPNPWTVNTVIESLTSPRTQGIKMTKHGTRGGSKIGTTVLDAEGNPIRLAPPTFDPATWKQIQEAAARRQGNRRSKTYTANPMLGVGHCGACGASLAQQFTHRKLADGTEVTYRTYRCGRTPLNCNGISMRGDEADGLLEQLFLEQYGSQPVTEKVFVPGEDHSEELEQVRATIDRLRRESDAGLIATAEDERIYFERMKSLIDRRTRLEAQPRRASGWVTQETDKTNADEWTKASTPDERRRLLMKQGIRFELVRGKPDPEVRLFTPGEIPEGEPLPEPSPR

SEQ ID NO: 2348 - protein, 522 aa, Artificial Sequence
  Description of Artificial Sequence: Synthetic polypeptide
MTCVFVVCLVNHRGLSGVRYKPMRALVVIRLSRVTDATTSPERQLESCQQLCAQRGWEVVGVAEDLDVSGAVDPFDRKRRPNLARWLAFEEQPFDVIVAYRVDRLTRSIRHLQQLVHWAEDHKKLVVSATEAHFDTTTPFAAVVIALMGTVAQMELEAIKERNRSAAHFNIRAGKYRGSLPPWGYLPTRVDGEWRLVPDPVQRERILEVYHRVVDNHEPLHLVAHDLNRRGVLSPKDYFAKLQGREPQGREWSATALKRSLISEAMLGYATLNGKTVRDDDGAPLVRAEPILTREQLEALRAELVKTDRTKPAVSTPSLLLRVLFCAVCGEPAYKFAGGGRKHPRYRCRSMGFPKHCGNGTVAMAEWDAFCEEQVLDLLGDSERLEKVWVAGSDSAVELAEVNAELVDLTSLIGSPAYRAGSPQREALDARIAALAARQEELEGLEARPSGWEWRETGQRFGDWWREQDTAAKNTWLRSMNVRLTFDVRGGLTRTIDFGDLQEYEQHLRLGSVVERLHTGMS

SEQ ID NO: 2349 - protein, 522 aa, Artificial Sequence
  Description of Artificial Sequence: Synthetic polypeptide
MMTCVFVVCLVNHRGLSGVRYKPMRALVVIRLSRVTDATTSPERQLESCQQLCAQRGWDVVGVAEDLDVSGAVDPFDRKRRPNLARWLSFEDQPFDVIVAYRVDRLTRSIRHLQQLVHWAEDHKKLVVSATEAHFDTTTPFAAVVIALMGTVAQMELEAIKERNRSAAHFNIRAGKYRGSLPPWGYLPTRVDGEWRLVPDPVQRERILEVYHRVVDNHEPLHLVAHDLNRRGVLSPKDYFAQLQGREPQGRAWSATALKRSLISEAMLGYTTLNGKTVRDDDGAPLVRAEPILTREQLEALRAELVKTDRTKPAVSAPSLLLRVLFCAVCGEPAYKFDAGRKIPRYRCRSFGFAQRCGNGTIPIAEWDAFCEEQVLDLLGDSERLEKVWVAGSDSAVELAEVNAELVDLTSLIGSPAYRVGSPQREALDSRIAALAARQEELEGLEARPSGWEWRETGQRFGDWWREQDIAAKNTWLRSMNVRLTFDVRGGLTRTIDFGDLQEYEQHLRLGSVVERLHTGMS

SEQ ID NO: 2350 - protein, 522 aa, Artificial Sequence
  Description of Artificial Sequence: Synthetic polypeptide
MTCVFVVCLVNHRGLSGVRYKPMRALVVIRLSRVTDATTSPERQLESCQQLCAQRGWDVVGVAEDLDVSGAVDPFDRKRRPNLARWLAFEEQPFDVIVAYRVDRLTRSIRHLQQLVHWAEDHKKLVVSATEAHFDTTTPFAAVVIALMGTVAQMELEAIKERNRSAAHFNIRAGKYRGSLPPWGYLPTRVDGEWRLVPDPVQRERILEVYHRVVDNHEPLHLVAHDLNQRGLPSPKDYFAKLQGREPKGREWSATALKRSLISEAMLGYATLNGKTVRDDDGAPLVRAEPILTREQLEALRAELVKTDRTKPAVSTPSLLLRVLFCAVCGEPAYKFAGGQRKNPRYRCRSMGFPKHCGNGTVAMAEWDAFCEEQVLDLLGGSERLEKVWVSGSDSAVELAEVNAELVDLTSLIGSPAYRVGSPQREALDARIAALAARQEELEGLEARPSGWEWRETGQRFGDWWREQDIAAKNTWLRSMNVRLTFDVRGGLTRTIDFGDLQEYEQHLRLGSVVERLHTGMS

SEQ ID NO: 2351 - protein, 522 aa, Artificial Sequence
  Description of Artificial Sequence: Synthetic polypeptide
MTCVFVVCLVNHRGLSGVRYKPMRALVVIRLSRVTDATTSPERQLESCQQLCAQRGWDVVGVAEDLDVSGAVDPFDRKRRPNLARWLAFEEQPFDVIVAYRVDRLTRSIRHLQQLVHWAEDHKKLVVSATEAHFDTTTPFAAVVIALMGTVAQMELEAIKERSRSAAHFNIRAGKYRGSLPPWGYLPTRVDGEWRLVPDPVQRERILEVYHRVVDNHEPLHLVAHDLNQRGLPSPKDYFAKLQGREPKGREWSATALKRSLISEAMLGYATLNGKTVRDDDGAPLVRAEPILTREQLEALRAELVKTDRTKPAVSTPSLLLRVLFCAVCGEPAYKFAGGQRKNPRYRCRSMGFPKHCGNGTVAMAEWDAFCEEQVLDLLGGSERLEKVWVSGSDSAVELAEVNAELVDLTSLIGSPAYRVGSPQREALDARIAALAARQEELEGLEARPSGWEWRETGQRFGDWWREQDIAAKNTWLRSMNVRLTFDVRGGLTRTIDFGDLQEYEQHLRLGSVVERLHTGMS

SEQ ID NO: 2352 - protein, 522 aa, Artificial Sequence
  Description of Artificial Sequence: Synthetic polypeptide
MMTCVFVVCLVNHRGLSGVRYKPMRALVVIRLSRVTDATTSPERQLESCQQLCAQRGWDVVGVAEDLDVSGAVDPFDRKRRPNLARWLAFEEQPFDVIVAYRVDRLTRSIRHLQQLVHWAEDHKKLVVSATEAHFDTTTPFAAVVIALMGTVAQMELEAIKERNRSAAHFNIRAGKYRGSLPPWGYLPTRVDGERRLVPDPVQRERILEVYHRVVDNHEPLHLVAHDLNRRGVLSPKDYFAKLQGREPQGREWSATALKRSLISEAMLGYATLNGKTVRDDDGAPLVRAEPILTREQLEALRAELVKTDRAKPAVSTPSLLLRVLFCAVCGEPAYKFDAGRKIPRYRCRSFGFAQRCGNGTVPIAEWDAFCEEQVLDLLGDSERLEKVWVAGSDSAVELAEVNAELVDLTSLIGSPAYRVGSPQREALDARIAALAARQEELEGLEARPSGWEWRETGQRFGDWWREQDTSAKNTWLRSMNVRLTFDVRGGLTRTIDFGDLQEYEQHLRLGSVVEQLHAGMS

SEQ ID NO: 2353 - protein, 522 aa, Artificial Sequence
  Description of Artificial Sequence: Synthetic polypeptide
MMTCVFVVCLVNHRGLSGVRYKPMRALVVIRLSRVTDATTSPERQLESCQQLCAQRGWDVVGVAEDLDVSGAVDPFDRKRRPNLARWLSFEEQPFDVLVAYRVDRLTRSIRHLQQLVHWAEDHKKLIVSATEAHFDTTSPFAAVVIALMGTVAQMELEAIKERNRSAAHFNIRAGKYRGSLPPWGYMPARVDGEWRLLVDPVQRERILEVYHRVVDNHEPLHLVAHDLNQRGILSPKDYFAQLQGREPQGRAWSATALKRSLISEAMLGYTTLNGKTVRDDDGAPLVRAEPILTREQLEALRAELVKTDRTKPAVSAPSLLLRVLFCAVCGEPAYKFDAGRKIPRYRCRSFGFAQRCGNGTIPIAEWDAFCEEQVLDLLGDAERLEKVWVAGSDSAVELAEVNAELVDLTSLIGSPAYRAGSPQREALDARIAALAARQEELEGLEARPSGWEWRETGQRFGDWWREQDTAAKNTWLRSMNVRLTFDVRGGLTRTIDFGDLQEYEQHLRLGSVVEQLHTGMS

SEQ ID NO: 2354 - protein, 521 aa, Artificial Sequence
  Description of Artificial Sequence: Synthetic polypeptide
MKNVITIEANAPRNSELASISLPKKRRVAGYARVSTDHEDQTTSYESQMRYYAEYISTRSDWEFVKMYSDEGISGTNTKLRVGFKSMIEDALAGKIDLIITKSVSRFARNTVDSLTTVRKLKEVGVEIYFEKENIWTLDSKGELLITIMSSLAQEESRSISENVTWGLRKQFAEGKVHFPYTNVMGFEKGENGEIVVNQEEAKTVRYIFQQALLGKTPYSIAKDLTQQGILSPSGKNHWSSVTIKRMLRNEKYKGDALLQKTYTIDFLSKKKNINKGELPQYYVENNHEAIVDKETFDAVQASLDRKEKGKGSTTLFSSKLVCGDCGHYFGSKVWHSTSKYRRVIYQCNEKYKGEKKCTTPHVTEDEIKDWFVTAINKVISNKDEIIQNLEMLLDVGESSDLERRLVELETEVEVVTQMVSNLVKENAIMPQDQDTYQKKYSNLVERHDALVSEIESIEKQLLEAASHQKDLKEFLKTLNQQSELISEFDELLWETMVDEIKIFCDQTVAIKFKNGIEVVE

SEQ ID NO: 2355 - protein, 521 aa, Artificial Sequence
  Description of Artificial Sequence: Synthetic polypeptide
MRVLGRIRLSRATDESTSVERQREIIAQWASLHGHQIVGWAEDQDVSGTVDPFKAPALGPWFKEDKRGEWDILCCWKLDRLTRSAIRLSAVIGWCLDHDKTIVSCGEEYLDISTPVGRLIAGVIGFLAEGEREAISERTLASQKKLRETGRWGGGKIFYGYKAAERQDAAGWELVPDEHASKVLYGIIEKVLAGQSTESVARELNEAGEMAPLDYQRHRAGKPTKGGMWSNAHIRQQLRSKALLGHMTHNGKTVRDEDGLPILKGPPLIDQDKFDQLQGVLENRSFTVSQRSTNASPLLSVAFCGMTVEDGVCGKPLHIRQHRRNGKLYRYYQCTGGADGHVKTHTEANIIKADELEEKFENWFLAVYGDERVKEQVFIPASDQSAEKAELVRAAQDIAPLYAAAASGTMKSLYLSQLESFDRRIAELDKMPTESARYEWREQTKTYGEVWETSTTEERRQLLMKRKVRAEVAVPKGDGRYRSSGQAMIHMFALDIDMEAFEARAAEERRKYGIPDDEVAL

SEQ ID NO: 2356 - protein, 521 aa, Artificial Sequence
  Description of Artificial Sequence: Synthetic polypeptide
MTCVFVVCLVNHRGLSGVRYKPMRALVVIRLSRVTDATTSPERQLESCQRLCAQRGWDVVGVAEDLDVSGAVDPFDRKRRPNLARWLAFEEQPFDVIVAYRVDRLTRSIRHLQQLVHWAEDHKKLVVSATEAHFDTTTPFAAVVIALMGTVAQMELEAIKERNRSAAHFNIRAGKYRGSLPPWGYLPTRVDGEWRLVPDPVQRERILEVYHRVVDNHEPLHLVAHDLNRRGVLSPKDYFAKLQGREPQGREWSATALKRSLISEAMLGYATLNGKTVRDDDGAPLVRAEPILTREQLGALRAELVKTDRTKPAVATPSLLLRVLFCAVCGEPAYKFDAGRKIPRYRCRSFGFAARCGNGTVPIAEWDAFCEEQVLDLLGDSERLEKVWIAGSDSAVELAEVNAELVDLTSLIGSPAYRVGSPQREALDARIAALAARQEELEGLEARPSGWEWRETGQRFGDWWREQDTAAKNTWLRSMNVRLTFDVRGGLTRTIDFGDLQEYEQHLRLGSVVERLHTGMS

SEQ ID NO: 2357 - protein, 521 aa, Artificial Sequence
  Description of Artificial Sequence: Synthetic polypeptide
MARITKIETTKSFVKERKIRVAAFTRVSTKSEEQLLSLEIQKEHYESYINANSSWEYAGLYYDEGISGTKIEKREGLLALLKDCEDGKIDRVITKSISRFSRNTTDCLEMVRKLTSLKVFLFFEKENIDTEHMSSELMLSILSSIAESESKSISQNSKWSIKNHFKAGTFIISYPPYGYENKDGKMNIVPKEADIVKEIFTMTINGMGTHLIARELNNRSIPSKKGDKWHGSTVRGILQNEKYTGDAIFQKTYTDDNYNRHINYGEENMYLYKNHHEPIISHEIFDKVAEVIKQRGREKSIEKGTGKYQSRYVFSGKIYCGECGATFKRRQHYKPSGDYVAWCCNRHITDKNACSMMYIRDEDIKTTFLRMIRKLQTVHDQVLKPFVMSLKGTNNKQRLKQVLALEEQIEKNAEQATVLTNLMSSGYIEPEVFHAENNQLTLEADRLARNKQLIVKSINGDLSHLDEAQKLLRFTSKKEVITEFNDALFLEYVDTIKVNNRNEITFALKCGLNLTERLVKI

SEQ ID NO: 2358 - protein, 521 aa, Artificial Sequence
  Description of Artificial Sequence: Synthetic polypeptide
MKNVITIGANAPRNSELASISLPKKRRVAGYARVSTDHEDQTTSYESQMKYYTEYISSRSDWEFVKMYSDEGISGTNTKLRVGFKSMIEDALAGKIDLIITKSVSRFARNTVDSLTTVRKLKEVGVEIYFEKENIWTLDSKGELLITIMSSLAQEESRSISENVTWGLRKQFAEGKVHFPYTNVMGFEKGENGEIVVNQEDAKTVRYIFQQALLGKTPYSIAKDLTQQGILSPSGKNHWSSVTIKRMLRNEKYKGDALLQKTYTIDFLSKKKNINKGELPQYYVENNHEAIVDKETFDAVQATLDRKEKGKGSTTLFSSKLVCGDCGHYFGSKVWHSTSKYRRVIYQCNEKYKGEKKCTTPHVTEDEIKDWFVSAINKVISNKDEIISNLETLLEISGTADLEQRMKELETEVEVVSQMISKLVTDNAVMPQNQDVYQEKYRNLVDRYDALIVELESVEKEHLDKAKRNKELQAFLKTLKSQECLVTEFDDLLWETAVERIIIKENRNIEFIFKNGEVTVH

SEQ ID NO: 2359 - protein, 521 aa, Artificial Sequence
  Description of Artificial Sequence: Synthetic polypeptide
MKKVITIEPARPVHQVEETSVFTRRRVAGYARVSTDHEEQATSYEAQMKYYTDYINSRIDWEFVKMYSDEGITGTNTKSRMGFKEMINDALDGKIDLIITKSVSRFARNTVDSLSTVRKLKEHGVEIYFEKENIWTFDSKGELLITIMSSLAQEESRSISENVKWGKRKQFERGKVSIPFKSTLGFQRGEHGELVVNQEEAKLVRYIFHEFLTGKNCNTIAKSLTEKGILTPMGKTKWTFGTIKRILQNEKYKGDALLQKTFVTDFLTKSTKVNEGELPQYYVENNHEAIIEKEVFELVQVEFVKQKQRKSSKTLFSGKLICESCGAAFGSKVWHSNSKYRRVVYRCNHKYDGDKKCKTPHVIENEVKQWFIEAMNQVIENKAEILANLEALRKVVANTSELDSEISRLETELTDLTSEVEQLISDNTRTIQDQTSYQNTYNQLASQYEEKKAELERLKVEKADKQKRAVKVKDVIDTFTHQQCLLTAFDEKLWNTMVEQVIITKEKSAIFTFKSGQEIII

SEQ ID NO: 2360 - protein, 521 aa, Artificial Sequence
  Description of Artificial Sequence: Synthetic polypeptide
MKKVITIEPAKQVSHKVDLPSFTKRRVAGYARVSTDHEDQTTSYEAQMKYYTDYINNRSDWEFVKMYSDEGISGTNTKARIGFQRMVEDALDGKIDLILTKSVSRFARNTVDSLSTVRKLKEAGVEIYFEKENIWTFDSKGELLITIMSSLAQEESRSISENVTWGRRRQLAEGQVTFSYSQVLGFKKSDTGGFEIDHEEAKIVRYIFHQVLLGNNPNKIARELTAQGIPTPQGKRQWSYGTVKRMLRNEKYKGDALLQKSFTTDFLTKSTKPNEGELPQYYVENNHEAIIKREVFDLVQVELDKLEKKRQTSNIFTGRLFCGDCGSAFGSKVWHSTSKYKRTIYQCNAKYKGEHKCRTPHVTEEEIKGWFLSAINQLLSNRDEIIANTELLIDMAKDTSPLESRIDDLEHHLETIRQDIEDLVDRNARKAQNQDLYQEQYDTLVTAYQEIQKELQEATLSLEEQKSRSISLDGFIQELKQQDSLITDFNQELWQTSVERLDIKVDKHISLTFKNGVRIDL

SEQ ID NO: 2361 - protein, 521 aa, Artificial Sequence
  Description of Artificial Sequence: Synthetic polypeptide
MKKVITIEPAKQVTHKVDLPSFTKRRVAGYARVSTDHEDQTTSYEAQMTYYTDYINSRSDWEFVKMYSDEGISGTNTKKRLGFQEMVEDALDGKVDLILTKSVSRFARNTVDSLSTVRKLKEAGVEIYFEKENIWTFDSKGELLITIMSSLAQEESRSISENVTWGRRRQLAEGQVTFSYSQVLGFKKSDTGGFEIDQEEAKIVRYIFHQVLLGNNPNKIARELTAQGIPTPQGKRKWSYGTVKRMLRNEKYKGDALLQKSFTTDFLTKSTKPNEGELPQYYVENNHEAIIKREVFDLVQVELDKLEKKRQTNNIFTGRLFCGDCGSAFGSKVWHSTSKYKRTIYQCNAKYKGEHKCQTPHVTEEEIKGLFLSAMNQLLSNREEIVANTELLIDLAKDTSPLENKIDDLEQQLETIRQDIEDLVDRNARKAQNQDLYQEQYDTLVTAYQERQKELQEATSSLEEQKSKQLSLDGFIQQLKQQEDLITDFNQELWQTSVERLDIKEGKKISLTFKNGVRIDL

SEQ ID NO: 2362 - protein, 521 aa, Artificial Sequence
  Description of Artificial Sequence: Synthetic polypeptide
MKKVITIEPAKQVTHKVDLPSFTKRRVAGYARVSTDHEDQTTSYEAQMTYYTDYINSRSDWEFVKMYSDEGISGTNTKKRLGFQEMVEDALDGKVDLILTKSVSRFARNTVDSLSTVRKLKEAGVEIYFEKENIWTFDSKGELLITIMSSLAQEESRSISENVTWGRRRQLAEGQVTFSYSQVLGFKKSDTDGFEIDQEEAKIVRYIFHQVLLGNNPNKIARKLTAQGIPTPQGKRKWSYGTVKRMLRNEKYKGDALLQKSFTTDFLTKSKKANEGELPQYYVENNHEAIIKRDVFDLVQVELDKLEKKRQTSNIFTGRLFCGDCGSAFGSKVWHSTSKYKRTIYQCNAKYKDEHKCQTPHVTEEEIKGWFLSAMNQLLSNREEIVANTELLIDLAKDTSPLENKIDDLEQQLETIRQDIEDLVDRNARKAQNQDLYQEQYDTLVTAYQERQKELQEATSSLEEQKSKQLSLDGFIQQLKQQEDLITDFNQELWQTSVERLDIKEGKKISLTFKNGVRIDL

SEQ ID NO: 2363 - protein, 521 aa, Artificial Sequence
  Description of Artificial Sequence: Synthetic polypeptide
MKKVITIEPAKQVTHKVDLPSFTKRRVAGYARVSTDHEDQTTSYEAQMTYYTDYINSRSDWEFVKMYSDEGISGTNTKKRLGFQEMVEDALDGKVDLILTKSVSRFARNTVDSLSTVRKLKEAGVEIYFEKENIWTFDSKGELLITIMSSLAQEESRSISENVTWGRRRQLAEGQVTFSYSQVLGFKKSDTGGFEIDQEEAKIVRYIFHQVLLGNNPNKIARELTAQGIPTPQGKRKWSYGTVKRMLRNEKYKGDALLQKSFTTDFLTKSTKPNEGELPQYYVENNHEAIIKREVFDLVQVELDKLEKKRQTNNIFTGRLFCGDCGSAFGSKVWHSTSKYKRTIYQCNAKYKGEHKCQTPHVTEEEIKGWFLSAMNQLLSNREEIVANTELLIDLAKDTSPLENKIDDLEQQLETIRQDIEDLVDRNARKAQNQDLYQEQYDTLVTAYQERQKELQEATSSLEEQKSKQLSLDGFIQQLKQQEDLITDFNQELWQTSVERLDIKEGKKISLTFKNGVRIDL

SEQ ID NO: 2364 - protein, 520 aa, Artificial Sequence
  Description of Artificial Sequence: Synthetic polypeptide
MKNKIAIYVRVSTTKESQKDSPEHQKWACIEHCKQIDLDTSDLIIYEDRDTGTSIVARPQIQEMISDAQKGLFNTILFSSLSRFSRDALDSISLKRIFVNALGIRVISIEDFYDSQVEDNEMLFGIVSVVNQKLSEQISVASKRGIKQSAAKGNFIGNIAPYGYQKVNIEGRKTLIVDIEKAKVVREIFDLYVNKKMGEKEITKHLNENAIPSAKGGTWGITSVQRILQNEIYTGYNVYGKYEIKKVYTNLKNIGDRKRKLVKKDQELWQKSEKRTHQEIISQELYKKAQEIRQIRGGGKRGGRRKYVNVFAKIIYCKHCGSAMVTASCKKPDKYRYLICSKRRRHGASGCPNDKWIPYYDFRDEVISWVVEKLNKMIDSETGSEYSINFVSSINQNIGKEIDKINKLIESNRRLLFELRKSKMLGEIDEKQYGFEKEEYEKEILQLEEKVIKLTENERHDKDFEKIRKEIKQSVDELVTMGNYDDVEKTRIILSRLIQRIVVDSEGQIDVITPLGVVKD

SEQ ID NO: 2365 - protein, 520 aa, Artificial Sequence
  Description of Artificial Sequence: Synthetic polypeptide
MKNKIAIYVRVSTTKESQKDSPEHQKWACIEHCKQIDLDTADLIIYEDRDTGTSIVARPQIQEMISDAQKGLFNTILFSSLSRFSRDALDSISLKRIFVNALGIRVISIEDFYDSQIEDNEMLFGIVSVVNQKLSEQISVASKRGIKQSAAKGNFIGNIAPYGYQKVNIEGRKTLIVDIEKAKVVREIFDLYVNKKMGEKEITKHLNENAIPSAKGGTWGITSVQRILQNEIYTGYNVYGKYEIKKVYTNLKNIGDRKRKLVKKDQELWQKSEKRTHPEIISQELYKKAQEIRQIRGGGKRGGRRKYVNVFAKIIYCKHCGSAMVTASCKKSDKYRYLICSKRRRHGASGCPNDKWIPYYDFRDEVISWVVEKLKKMINSETGSEYSINFVSSINQNIGKEIDKINKLIESNRRLLFELRKSKMLGEIDEKQYGFEKEEYEKEILQLEEKVIKLTENERHDKDFEKIRKEIKQSVDELVTMGNYDDVEKTRIILSRLIQRIVVDSDGQIDVITPLGVIKD

SEQ ID NO: 2366 - protein, 520 aa, Artificial Sequence
  Description of Artificial Sequence: Synthetic polypeptide
MVCLVNHRGLSGVRYKPMRALVVIRLSRVTDATTSPERQLESCQQLCAQRGWDVVGVAEDLDVSGAVDPFDRKRRPNLARWLAFEEQPFDVIVAYRVDRLTRSIRHLQQLVHWAEDHKKLVVSATEAHFDTTTPFAAVVIALMGTVAQMELEAIKERNRSAAHFNIRAGKYRGSLPPWGYLPTRVDGEWRLVPDPVQRERILEVYHRVVDNHEPLHLVAHDLNRRGVLSPKDYFAKLQGREPQGREWSATALKRSLISEAMLGYATLNGKTVRDDDGAPLVRAEPILTREQLEALRAELVKTSRAKPAVATPSLLLRVLFCAVCGEPAYKFDAGRKIPRYRCRSFGFAVRCGNGTVPIAEWDAFCEEQVLDLLGDSERLEKVWVAGSDSAVELAEVNAELVDLTSLIGSPAYRAGSPQREALDARIAALAARQEELEGLEARPSGWEWRETGQRFGDWWRDQDTAGKNTWLRSMNVRLTFDVRGGLTRTIDFGDLQEYEQHLRLGSALDLVNAEKPPTGR

SEQ ID NO: 2367 - protein, 520 aa, Artificial Sequence
  Description of Artificial Sequence: Synthetic polypeptide
MKNPENREPEFQHSSLLATVSDMRVLGRLRISRATEESTSIERQREIVEQWASVNDHEIVGWAVDQDVSGSVDPFDAPALGPWLSDHRKHEWDILCAWKLDRLSRRAIPMNKLFGWMIDNDKTLVCVSENLDLGTWVGRMIANVIAGVAEGELEAIRERTTASHKKLRELGRWAGGPTYYGYIPKPRDGAGWELDIDPHAASVLREIIEKTIAGVPSETIVVELNERGELSPSDYHRKRNGKPVKGTAWNTSWLRQQLKSKTLLGHMTHKGETVYDDAGLPVQKGPALIDRDTYKQLQDALESRGINRTRRRTGASPLLGVAVCDVCDGPLYYRQTKNSKGTGMLRQYICKHGRYGNTKANGGEPYNIIQADLLEATVEELFLSKMGDQPRVERVFIPGEGHQHELETAERAVEDLTSLLGTITQEGARKRLLAQLAAAHERLAHLEELPSSEPHWETRETGETYREAWEGATTEERRQILLKAGVTLKVQMKDRVPRVHPGVIVANWIEPHDIEKRLAS

SEQ ID NO: 2368 - protein, 520 aa, Artificial Sequence
  Description of Artificial Sequence: Synthetic polypeptide
MKKITKIDELPQGQLPNTKLRVAAYARVSTDSDEQLESLKAQREHYERYIKSNPEWEFAGLYYDEGISGTKMEKRTELLRMIRDCKRGRIDFIITKSISRFARNTVDCLELVRKLIDIGVYIYFEKENLNTGDMESELMLSILSGFATEESASISQNSTWSIQKRFQNGSYVGTPPYGYTNIDGEMVIVPEEAEIIKRIFAECLSGKGGGTIARGLNKDKIPASRGNHWSAGTVIDMLRNEKYMGDVLLQKTYTDSNYNRHPNTGEKDQYYYKDNHEPIISREDFAKAQDLIDERAKMKCKGVKKNVYLNRYALSGKIVCGECGRNFRRKTNYSVGRSYIAWSCIGHIEDKESCSMLFLRDGEIKATLTTMMNKLAFSHKLILEPLFKSISQIDKESDRERMDAIDKRLEQLMEERNTLITLMAKGFLEPALFNQERNVLDSEMKNLSTEKTNLVSNSASGILRANEIKDLIDYVSADNFNGDYTEEIFEEFVENIIVNSRDELTFNLKCGLSLKEKVVR

SEQ ID NO: 2369 - protein, 520 aa, Artificial Sequence
  Description of Artificial Sequence: Synthetic polypeptide
MTEKNIMVIPARKRVGSTAAKEKIKKLRVAAYCRVSTETEEQNSSYEVQVAHYTEFIKKNNEWEFAGIFADDGISGTNTKKRDEFNRMIAECMDGNIDMVITKSISRFARNTLDCLQYIRQLKDKNISVYFEKENINTMDAKGEVLLTIMASLAQQESQSLSQNVKLGLQYRYQQGKVQVNHKRFMGYTKDEDGNLIIVPEEAEVIKRIYREYLEGQSLVGIGRGLEKDGILTAAGKPKWRPESVKKILQNEKYIGDALLQKTVTVDFLTKKRVKNEGHVPQYYVENSHEAIIPKELFLQVQEEIHRRSNIYTGEGKNKRIYSSKYALSAITFCGDCGDIYRRTYWNIHGRKEFVWRCVTRIEQGPEVCKNRTVKEDELYGAVMTAINRLLAGGNNMIKTLEENIHAVIGETTEYQISEINNLLEEKQKEIIKLANMGQGYEHLAEEIDELRDKRQTLLVEDASLSGENERINELIEFIRKNIFRTLEYDDKLVRKIIQSVTVYEDHFVIAFKSGFEMEV

SEQ ID NO: 2370 - protein, 520 aa, Artificial Sequence
  Description of Artificial Sequence: Synthetic polypeptide
MGCRSCRLLRMSTPASPPRAVLYLRLSREDDASTSIVRQRAELEELAEREGWLIERELVDDGLTGRKQRANAVEALRMLRDGEADALVVWKFDRWSRQGLRAVADLVETLDERPDALFVAHRDGLRSSSPAWRIIASVLAEVARMESENTSTRIRSSQRHLREAGRFRGMVVPFGYRATANPDGPGRVLVHDELEAPLIRDIARRVLEDGATLTELTRELRDRGIPTGKSPARKARQAGKPHADLERGLWHLSALRTLLRNETLLGRTTHVVDGRRVAYTDEHGLPVTLWPPILDVATVQALRERLPEHGGKIGARTATRRAARLLSGVAWCECGAKLYVHRSGRAPYYRCSSKSFDIDAPCPAPRILAEPLEAHVADAYLAVAGAWPELEEVRVVSNPETDAELADIETALAEATTALLSDGADDVAILARIGALKARRRELADRPASAHVELRPTGRTMAEAWHAADPETADGLRKRRDLVLAALDHVELRPGAHKTHPGPIEERVRLHWHPPLELAA

SEQ ID NO: 2371 - protein, 520 aa, Artificial Sequence
  Description of Artificial Sequence: Synthetic polypeptide
MKKVITIQATPSIIRSSSDDFSLKKRRVAGYARVSTDHEDQATSYESQMRYYSEYISGRDDWEFVKMYSDEGISGTNTKLRTGFKAMVEDALNGKIDLIITKSVSRFARNTVDSLTTVRQLKEVGVEIYFEKENIWTLDSKGELLITIMSSLAQEESRSISENVTWGLRKQFAEGKVHFPYTNVLGFKAGEDGAIVVDQDEAKTVRYIFQQALIGKSPYHIAKDLTEQGIPSPSGKSRWNATTIKRMLRNEKYKGDALLQKTYTIDFLTKKKNINRGELPQYYVENNHEAIVDRETFDAVQQVLDAKGKKSSTSIFSSKLVCGDCGHFFGSKVWHSTSKYRRVIYRCNEKYNGENRCATPHVTEKEIKQWFVLAVNQVIENKDEIIDNIKVLCSIGSLEGIDNQIKELETETEILSQMVSRLVMENASTLQDQDEYQSKYRQLSAKYESLVEEIEELEVQKLAKSKRNKDLQDFITGLKQQEGLLTDFDELLWETMIESITITKDSDVEITFKNGAVSTI

SEQ ID NO: 2372 - protein, 520 aa, Artificial Sequence
  Description of Artificial Sequence: Synthetic polypeptide
MKKVITIQATPSIIRSSSDDFSLKKRRVAGYARVSTDHEDQATSYESQMRYYSEYISGRDDWEFVKMYSDEGISGTNTKLRTGFKAMVEDALNGKIDLIITKSVSRFARNTVDSLTTVRQLKEVGVEIYFEKENIWTLDSKGELLITIMSSLAQEESRSISENVTWGLRKQFAEGKVHFPYTNVLGFKAGEDGAIVVDQDEAKTVRYIFQQALIGKSPYHIAKDLTEQGIPSPSGKSHWNATTIKRMLRNEKYKGDALLQKTYTIDFLTKKKNINRGELPQYYVENNHEAIVDRETFDAVQQVLDAKGKKSSTSIFSSKLVCGDCGHFFGSKVWHSTSKYRRVIYRCNEKYNGENRCATPHVTEKEIKQWFVLAVNQVIENKDEIIDNIKVLCSIGSLEGIDNQIKELETETEILSQMVSRLVMENASTLQDQDEYQSKYRQLSAKYESLVEEIEELEVQKLAKSKRNKDLQDFITGLKQQEGLLTDFDELLWETMIESITITKDSDVEITFKNGAVSTI

SEQ ID NO: 2373 - protein, 520 aa, Artificial Sequence
  Description of Artificial Sequence: Synthetic polypeptide
MTEKNIMVIPARKRVGSTAAKEKIKKLRVAAYCRVSTETEEQNSSYEVQVAHYTEFIKKNNEWEFAGIFADDGISGTNTKKRDEFNRMIAECMDGNIDMVITKSISRFARNTLDCLQYIRQLKDKNISVYFEKENINTMDAKGEVLLTIMASLAQQESQSLSQNVKLGLQYRYQQGKVQVNHKRFMGYTKDEDGNLIIVPEEAEIIKRIYREYLEGQSLVGIGRGLEKDSIFTAAGKPRWRPETVKKILQNEKYIGDALLQKTVTVDFLTKKRVKNEGHVPQYYVENSHEAIIPKELYLQVQEEIHRRSNIYTGEGKNKRIYSSKYALSAITFCGDCGDIYRRTYWNIHGRKEFVWRCVTRIEQGPEVCKNRTVKEDELYGAVMTAINKLLAGGNNMIKTLEENIHAVIGETTEYQISEINNLLEEKQKELIKLANKGKDYEHLADEIDELRDKRQILLVEDASLSGENERINELIEFIRKNKFRTLEYDDKLVRKIIQNVTVYEDHFVIAFKSGFEMEI

SEQ ID NO: 2374 - protein, 520 aa, Artificial Sequence
  Description of Artificial Sequence: Synthetic polypeptide
MKKITKIDELPKGQLPNTKLRVAAYARVSTDSDEQLESLKAQREHYERYIKSNPEWEFAGLYYDEGISGTKMEKRTELLRMIRDCKQGRIDFIITKSISRFARNTVDCLELVRKLIDIGVYIYFEKENLNTGDMESELMLSILSGFAAEESASISQNSTWSIQKRFQNGSYVGTPPYGYTNIDSEMVIVPEEAEIIKRIFAECLSGKGGGTIARGLNKDKIPTRRGNHWSAGTVIDMLRNEKYMGDVLLQKTYTDSNYNRHPNTGEKDQYYYKDNHEPIISREDFAKAQDLIDERAKMKCKGVKKNVYLNRYALSGKIVCGECGRNFRRKTNYSAGRSYIAWSCIGHIEDKESCSMLFLRDGEIKATFTTMMNKLAFSNKLILEPLFKSISQIDEESDRERMDAIDKRMEQLMEERNTLITLMAKGFLEPALFNQERNVLDSEMKNLSTEKTNLVSNSASGILRANEIKDLIDYVSADNFNGDYTEELFEEFVENIIVNSRDELTFNLKCGLSLKEKVVR

SEQ ID NO: 2375 - protein, 520 aa, Artificial Sequence
  Description of Artificial Sequence: Synthetic polypeptide
MKNPEKREPEFQHSSLLATVSDMRVLGRLRISRATEESTSIERQREIVEQWASVNDHEIVGWAVDQDVSGSVDPFDAPALGPWLSDHRKHEWDILCAWKLDRLSRRAIPMNKLFGWMIDNDKTLVCVSENLDLGTWVGRMIANVIAGVAEGELEAIRERTTASHKKLRELGRWAGGPTYYGYVPKPRDGAGWELDIDPHAAGVLKEIIEKTIAGQATEAIVVELNERGELSPSDYHRKRSGKPIRGTKWNTSWLRTQLKSKTLLGHMTHNGETVYDDAGLPVQKGPALIDRDTYKQLQDALQSRGINRTKRRTGASPLLGVAVCDVCDGPLYYRQTKNQKGTAMLRQYICKHGRYGNTKANGGEPYNIIQADLLEATVEELFLSKMGDLLRVERVFIPGEGHQHELETAERAVEDLTSLLGTITQEGARKRLLAQLSAAHERLAHLEELPSSEPRWETRETGETYREAWESATTEERRQILLKAGVTLKVQMKGRVPRVHPGVIVANWIEPHDIEKRLAS

SEQ ID NO: 2376 - protein, 520 aa, Artificial Sequence
  Description of Artificial Sequence: Synthetic polypeptide
MKNPEKREPEFQHSSLLATVSDMRVLGRLRISRATEESTSIERQREIVEQWASVNDHEIVGWAVDQDVSGSVDPFDAPALGPWLSDHRKHEWDILCAWKLDRLSRRAIPMNKLFGWMIDNDKTLVCVSENLDLGTWVGRMIANVIAGVAEGELEAIRERTTASHKKLRELGRWAGGPTYYGYVPKPRDGAGWELDIDPHAAGVLKEIIEKTIAGQATEAIVVELNERGELSPSDYHRKRSGKPIRGTKWNTSWLRTQLKSKTLLGHMTHNGETVYDDAGLPVQKGPALIDRDTYKQLQDALQSRGINRTKRRTGASPLLGVAVCDVCDGPLYYRQTKNQKGTAMLRQYICKHGRYGNTKANGGEPYNIIQADLLEATVEELFLSKMGDLPRVERVFIPGEGHQHELETAERAVEDLTSLLGTITQEGARKRLLAQLSAAHERLAHLEELPSSEPRWETRETGETYREAWESATTEERRQILLKAGVTLKVQMKGRVPRVHPGVIVANWIEPHDIEKRLAS

SEQ ID NO: 2377 - protein, 520 aa, Artificial Sequence
  Description of Artificial Sequence: Synthetic polypeptide
MNNPENREPEFYHSSLLATMSDMRVLGRLRISRATEESTSIERQRELVEQWAAANEHEIVGWAVDQDVSGSVDPFDAPALGPWLTDHRKHDWDILVAWKLDRLSRRAIPMNKLFGWMMDNEKTLVCVSENLDLGTWVGRMIANVIAGVAEGELEAIRERTTASHKKLRELGRWAGGPTYYGYVPKPRDGAGWELDLDPHAAGVLREIIDKTIAGKPSEAIAVELNERGELSPSDYLRKRNGKPIRNTAWNTSTIRHQLKSKTLLGHMTHKGETVYDDAGLPVQKGPALIDRDTYKQLQDALESRGINRTRRRTGASPLLGVAVCDVCEGPLYYRSADNKDRGKTYRQYICKHGRYGNTQANGGEPYNIIQADLLEATVEELFLSKMGDLPRVERVFVPGEGHQHELETAERAVEDLTSLLGTVTQEGARKRLLAQLAAAHERLAHLEELPSSEPRWETRETGETYREAWDKAGTEERRQILLKAGVTLKVQMKGRVPRVHPGVIVAHWIEPHDIEKRLAS

SEQ ID NO: 2378 - protein, 519 aa, Artificial Sequence
  Description of Artificial Sequence: Synthetic polypeptide
MLTDETTSPERQRGANHDAGAALGIDFSDREAVDLGVSASKTTPFERPELGAWLKRPDEFDALVFWRFDRAVRSMDDMHELSKWARDHRKMIVIAEGPGGRLVLDFRNPLDPMAQLMVTLFAFAAQFEAQSIRERVLGAQAAMRTMPLRWRGSKPPYGYEPAPLESGGMTLVQDADAVAVIETIIKELMGGKTLSAICHELNEAGIPSPRDYWNTKKGRKKGGRVGNSVGEKITKESFKWRHGTLKKLLTSESLLGWKMTETGPVRDDEGAPVMATNEPILSREEFDAVGALIVDANQDGTKWERRDSTALLLRSILCDGCGQHMFVGHPSANSKGISSVYKCGSWGRGEKCPEPASVKLEWAEDYVRERFLRTVGGMRLTETRHIPGYDPQPEIDATTAEYEAHMKEQGQQKSKAAQAAWKRRADALDARLAELETREARPARVEMVQLDTTIADAWRDADDKGRRDMLREAGVTVRIKRAKRGRTFKLNEDRVVWHMGNDFFAQGAEELEAIARAEA

SEQ ID NO: 2379 - protein, 519 aa, Artificial Sequence
  Description of Artificial Sequence: Synthetic polypeptide
MLTDETTSPERQRAANHDAGSSLGIDFSGREAVDLGVSASKTTPFERPELGAWLKRPDDFDALVFWRFDRAVRSMDDMHELSKWARDHRKMIVIAEGPGGRLVLDFRNPLDPMAQLMVTLFAFAAQFEAQSIRERVLGAQAAMRTMPLRWRGSKPPYGYLPAPLEGGGYTLVQDKDAVAVIERVIKELKNGKTLSAICHELNEAGIPSPRDHWSLIQKRKKGGRVGNSVGEKITKESFKWRHGALKKLLKSESLLGWKMTEQGPVRDDEGAPVMATREPILTREEFDAVGALITEANEDGTKWERRDSTALLLRVILCDGCGQHMFVGNPSANSKGISAVYKCGSWGRGEKCPEPASVKLEWAEDYVRERFLRSVGGMRLTETRHIPGYDPQPEIDATTAEYEAHMREQGQQKSKAAQEAWKRRATALDARLAELESREARPARVEVVQLDTTIADAWRDADDKERRDMLREAGVTVRIKRAKRGRTFKLNEDRVKWHMSNEFFDQGAEELEAIARTEA

SEQ ID NO: 2380 - protein, 519 aa, Artificial Sequence
  Description of Artificial Sequence: Synthetic polypeptide
MTKKIITIEPAKILRSSELPSLKKRKVAGYARVSTDRDDQASSYESQMKYYTDYIGSRSDWEFVKMYSDEGISGTNTKKRLGFQEMVEDALNGKIDLILTKSVSRFARNTVDSLTTVRKLKEVGVEIYFEKENIWTLDSKGELLITIMSSLAQEESRSISENIKWSKRKMAAEGAVSFGYAHVLGFKVAENGGFDIDEDEAKIVRYIFGLFLQGENPNSIARILTEKGIPTPAGKKLWSYSTVKSMLQNEKYKGDALLQKSFTVDYLTKQKKKNEGELPQYYVENNHRAIIDKATFDLVQLELQKTHNRNKVSFCGKVICGCCGNPYGRHVWHSNSKHRRHIYRCNKKYKGEQKCDSPSVSEEEIQGWSVEVINQVIGNKNDIINNMKLLIKMLENTDKLTETIKNLEREMADIGEQAEKMVERNAKVIQNQEMYQAEYDRLVTRYEELQSLLLEKQSTLQLKRKQSADVKLFVDLLAKQEHMVTAFDEKLFNTLIEKMVIYKNKKVAVHFKNGQVIEI

SEQ ID NO: 2381 - protein, 518 aa, Artificial Sequence
  Description of Artificial Sequence: Synthetic polypeptide
MCWILPAVPVTLETMPQPLRALVGARVSVVQGPQKVSQQAQLETARKWAEAQGHEIVGTFEDLGVSASVRPDERPDLGKWLTDEGASKWDVIVWSKMDRAFRSTKHCVDFAQWAEERQKVVMFAEDNLRLDYRPGAAKGIDAMMAELFVYLGSFFAQLELNRFKSRAQDSHRVLRQTDRWASGLPPLGYKTVPHPSGKGFGLDTDEDTKAVLYDMAGKLLDGWSLIGIAKDLNDRGVLGSRSRARLAKGKPIDQAPWNVSTVKDALTNLKTQGIKMTGKGKHAKPVLDDKGEQIVLAPPTFDWDTWKQIQDAVALREQAPRSRVHTKNPMLGIGICGKCGATLAQQHSRKKSDKSVVYRYYRCSRTPVNCDGVFIVADEADTLLEEAFLYEWADQPVTRRVFVPGEDHTYELEQINETIARLRRESDAGLIVSDEDERIYLERMRSLITRRTKLEAMPRRSAGWVEETTGQTYGEAWETEDHQQLLKDAKVKFILYSNKPRNIEVVVPQDRVAVDLAI

SEQ ID NO: 2382 - protein, 517 aa, Artificial Sequence
  Description of Artificial Sequence: Synthetic polypeptide
MCAKKKPAMLEPDMQDAVIYTRYSSHNQRDCSIEQQVADCEIFARQNNLRVVKVYADRHLSGTTDNRPQFQQMLKDASHGHWAYVICWKIDRFARNRYDSATYKFRLKKAGVRVLYAKESIPDGPEGILLESVLEGSAEYYSAALAQNIRRGMKFNAEQCKVNSGSIPFGYCKGPDGRFAIHEANAEVVREIFRKAAAGMPFVDIANDLNSRGLKTSRGGRWNKGSFRLLMNEAYIGVYHFSDTRIEGGMPALIDQGTFWAANERLKANSSVRGRHQDGGDYLLTGKLKCAHCGSYMIGFSGTGKSGELHYYYGCQKRRRERACKKANVPREWIERVVVKAALDYVLRPDVMEWIADAVMEYQEREAASAQLAALTAELEENQKATDNVMKAIEAGIITSTTKQRLLDLEAKAQDLKRAIELEKLSHVRLERDQVLFWLDRFRGGSLQSQEFRRKVIDAFVSVVYLSDDHLRIAFNYSGGSNAEADFDLVMDAEAAAGELSKKFAQGHVTSTNIKAT

SEQ ID NO: 2383 - protein, 517 aa, Artificial Sequence
  Description of Artificial Sequence: Synthetic polypeptide
MTYPFNMDQDLAKPTRRPRAVLYSRLSRASIVSTSMEGQREDLHGLAAREGWDVVAAFDDEGKSGGRKRANAEEALRMIRDGEADILAAYSVDRFSRQGIGEDAEVIRIIQAREHAARRGDGPPALAYFVREGIRSDSGDDWRLRYALSSEMAWKERELMVQRRQRSIYQLQEQGRFSGRGPAPWGYRSAPHPSGAGRTLVLDETEAHDIREAAARLISGASATSVATDMTARGVPAPRSPYRLALLKGEDPTGLATGFWGIGNLIQALTSPSITGRIVRHSRQTNALGGETRAGTPVLDAEGKPLQAFPPALPLGDWLALQERFQRGQGRGQQRTRKAARLASGLVWCQCGEKCYVIKYGRETRYRCASRSKGMIHCPAPSMSADVVEDIITQHYLATVGKLPAIERIESDDAPELAEALALAADELRRLTADMTKPGADIMTLATEVAKASARRDELLARPSERHVSWRPLGGSWADVWQTSDLETRRRQLTEAYDHWELRTPEHEPRLVPRTAE

SEQ ID NO: 2384 - protein, 515 aa, Artificial Sequence
  Description of Artificial Sequence: Synthetic polypeptide
MNSLEVAIYLRKSRADVEEEQKAIAKGEAYDALGKHRRELLSLARKANHRVIDMYEEIVSGESITARPKMKLLLENILAEKYEGVLVVDVDRLGRGNKGDQSVIEDAFKETNTLIITPSAIYDLNQEDGEMSVEMKTFLANMEYRSIKRRLQRGLINTAKQGKDVGGNAPYGYKKDENLRLVIDEDKADVIRLIFRRCIDGVGVRFIRKELHELEIKSPTGNEWWGTTMIKKVISNAKYAGKMTYGIKQHKKLKDGRYTVKTKTDPNKMVIVDDAHEPIVSLEDFEAAQNAMRHRDPRVNAKKRLVYPMAGLVRCAKCGRLMRCQAPSNRKHKYLYCGNELCNQKGIRLDEIEDSVINEISTILARVKIEGDNVSVKSLEDERRQILKRIAKIERERSKNIEKKERVYDSYEDGTYTKEMFQERLTFIQNADRKNEQTIDELNEQLSTLEQRKQTKLDMIPAIENVLDVYNMTDDAEHKNRLLKTVIKQIDYDREVNKNRVYDPNEVVLRVHLVE

SEQ ID NO: 2385 - protein, 515 aa, Artificial Sequence
  Description of Artificial Sequence: Synthetic polypeptide
MSGQPLRSQWCTVQTMRALVVIRLSRVTDATTSPERQLESCQQLCAQRGWDVVGVAEDLDVSGAVDPFDRKRRPNLARWLAFEEQPFDVIVAYRVDRLTRSIRHLQQLVHWAEDHKKLVVSATEAHFDTTTPFAAVVIALMGTVAQMELEAIKERNRSAAHFNIRAGKYRGSLPPWGYLPTRVDGEWRLVPDPVQRERILEVYHRVVDNHEPLHLVAHDLNRRGVLSPKDYFAKLQGREPQGREWSATALKRSLISEAMLGYATLNGKTVRDDDGAPLVRAEPILTREQLEALRAELVKTDRTKPAVSTPSLLLRVLFCAVCGEPAYKFAGGGRKHPRYRCRSMGFLKHCGNGTVAMAEWDAFCEEQVLDLLGDSERLEKVWVAGSDSAVELAEVNAELVDLTSLIGSPAYRVGSPQREALDARIAALAARQEELEGLEARPSGWEWRETGQRFGDWWREQDTSGKNTWLRSMNVRLTFDVRGGLTRTIDFGDLQEYEQHLRLGSVVERLHAGMS

SEQ ID NO: 2386 - protein, 515 aa, Artificial Sequence
  Description of Artificial Sequence: Synthetic polypeptide
MQVRALVGARVSHVQGEEKTSHLTQRTKGESYAESQGWTVVGGFEDLDVSAIKLSPWDRPDLKQWLDEKADDWDALIFSKTDRVFRSANDCVKLAEWCKDHRKILVLVDDGIKLDYFNPEDSKDAFAGAMSKVFLILASVFAEIEGQRFVQRARDRVAYLRPTDRWGYGNPPYGFVVVDHPTGVGKALGHDEGDQAVLHRIADEVLSGNSLVSICVKLNDEGVLSPSDRTRVRAKKEPEGSKWRPLTMKRLLTSPSTQGIKMAKERPVLDAQGEPVRVGPESFDAETWKQLGIELADRATEPSKRRHSTNPLLGVAKCAICGLNMRQHGKTTKYGSYRYYNCIGHPIACPKVSIVAETAEDAVYSIFLNSHSGRRVKERVWQAGSDHSAELDQTLRTIESLREDRAAGLFNDPEDAKMYQQQMAALLSKRTALSDAPIIKAGWVEMETDRTYGEVWESSTEEEKRKMLVDAGVVLWVTNRNDYYVGDLDKLLGEGDGGEEFLASTVLAKAGIASQ

SEQ ID NO: 2387 - protein, 514 aa, Artificial Sequence
  Description of Artificial Sequence: Synthetic polypeptide
MSGQPPRSQWCTVQTMRALVVIRLSRVTDATTSPERQLESCQQLCAQRGWDVVGVAEDLDVSGAVDPFDRKRRPNLARWLAFEEQPFDVIVAYRVDRLTRSIRHLQQLVHWAEDHKKLVVSATEAHFDTTTPFAAVVIALMGTVAQMELEAIKERNRSAAHFNIRAGKYRGSLPPWGYLPTRVDGEWRLVPDPVQRERILEVYHRVVDNHEPLHLVAHDLNRRGVLSPKDYFAKLQGREPQGREWSATALKRSLISEAMLGYATLNGKTVRDDDGAPLVRSEPILTREQLEALRAELVKTDRTKPAVSTPSLLLRVLFCAVCGEPAYKFDAGRKIPRYRCRSFGFAQRCGNGTVPISEWDAFCEEQVLDLLGDAERLEKVWVAGSDSAVELAEVNAELVDLTSLIGSPAYRVGSPQREALDARIAALAARQEELEGLEARPSGWEWRETGQRFADWWREQDTAAKNTWLRSMNVRLTFDVRGGLTRTIDFGDLQEYEQHLRLGNVVERLHTGMS

SEQ ID NO: 2388 - protein, 514 aa, Artificial Sequence
  Description of Artificial Sequence: Synthetic polypeptide
MAKRKFNKGGEVRLVAYYRYSGGSGQTEQSIEGQRRDCETYARLHNMTIQKEYVDRHISGKTDDRAAFQQMITDSDKGAFDMVICWKTDRFARNRYDSAVYKKRLRDNGVEIVYAAESNIAGAEGIIIEGVMEALAEYYSAELAEKMRRGMRESALKGQAISRCRALGLKTDEHKRFVIDEKTAPTVRFIFEHYAAGESATSIVDKLNAKGLRTSQGNPFNKSSIPRIIQNEAYRGVYVSKSYDVRIEGAIPAIIDDELWERAQTMLKLNRQLKAKNEPKADYILSGKLYCSCGSLMRGMSGHSATGEVYRYYTCPNKNCHLRNIPKDDLEGKVMQSISDHLLQPEAMEALAEAMVEVQKADAEKPNAERVAIEQSLADVRRRSKNILDAIENGTANAQLCARLDDLSEQERTLNFQLSALEKEKPVVFTKEQYLFLLEQFLVEPSERTPEYGRRLVNTFVTSMVVSDRELVINFNVSDETVNKNKKTSQTNLQKESSSGMRLVRVARIELTAS

SEQ ID NO: 2389 - protein, 514 aa, Artificial Sequence
  Description of Artificial Sequence: Synthetic polypeptide
MSGQPLRSQWCTVQTMRALVVIRLSRVTDATTSPERQLESCQQLCAQRGWDVVGVAEDLDVSGAVDPFDRKRRPNLARWLSFEEQPFDVIVAYRVDRLTRSIRHLQQLVHWAEDHKKLIVSATEAHFDTTTPFAAVVIALMGTVAQMELEAIKERNRSAAHFNIRAGKYRGSLPPWGYLPTRVDGEWRLVPDPVQRERILEVYHRVVDNHEPLHLVAHDLNQRGILSPKDYFAKLQGREPKGREWSATALKRSLISEAMLGYATLNGKTVRDGDGAPLVRAEPILTREQLEALRAELVKTDRTKPAVSTPSLLLRVLFCAVCGEPAYKFDAGRKIPRYRCRSFGFAVRCGNGTVPIAEWDAFCEEQVLDLLGDAERLEKVWVAGSDSAVELAEVNAELVDLTSLIGSPAYRVGSPQREALDARIAALAARQEELEGLEARPSGWEWRETGQRFGDWWREQDTAGKNTWLRSMNVRLTFDVRGGLTRTIDFGDLQEYEQHLRLGSVVERLHTGMS

SEQ ID NO: 2390 - protein, 513 aa, Artificial Sequence
  Description of Artificial Sequence: Synthetic polypeptide
MKRITKIEPAKKTSKKKLRVAAYARVSTNRDDQLISLDAQKNHYEKYIKAKPNWEYAGLYFDEGLSGTHMEKRNGLLKLLEDCERGKIDYIIVKSISRFSRNTIDSIETIRSLCEKGIYIFFEKENIDTGKMDSELLLSIFSSLAESESKSISENNKWGIQKKYQNGTFKIGYPPYGYHNIEGQMVIDEKEAEIVRLIFSEVLLGKSPGLIAKELNEKNITSKRGKNWSSSVIHGMIRNEKYTGDVIFQKTFTDENFNRHINYGERNQYYAKDHHAPIISHDTFEKANSIIEKNGKEKGIVKYAGKYKNRYALSGKIICDECGGKLKRVKLSSYFGFACNTHIKNKELCNMKTISEDSVKAAFATMMNKLSSAREVVLLPLERSLKRNSSDMQLSQLEELESLLEKNTERKNQLMNFFTSGLLDPALYSEEIMRLEEEIEVLVNEQELITKNLSGGYERQKALELILSYTAKKNIITEFDDALFLRHVDHIIVYSRTEIGFVMKFGPIFKERI

SEQ ID NO: 2391 - protein, 513 aa, Artificial Sequence
  Description of Artificial Sequence: Synthetic polypeptide
MAKKIVTIEAVKPVCHQVDFLRKRKVAGYARVSTDHDDQASSYEAQMCYYENYIQSRHDWEFVKMYSDEGISGTNTKKRLGFQEMVADALDGKIDLIITKSISRFARNTVDALTTVRKLKEVGVEIYFEKENIWTLDSKGELLITIMSSLAQEESRSISENITWSKRKMAAEGQVTFNYTHVLGFKESKEGGFEIDEKEAEVVRYIFGLFLQGENPNSIAKILTDKKIATPAGKKVWSYSTIKSILSNEKYKGDALLQKSFTVDFLTKTRKTNQGELPQYYIENNHEAIIDKAIFDMVQVELKHERSRSTLSYFGKVICGCCGGSYGRQTWHSTSKYKRVVYRCNHKYKGEEKCDTPHASREEIEAWISQAISQLITNKDEIIRNLECLISVLAKSGQLEDELKTLESQLFSIQEEVEQLVNGKLTQNLYSQYDALVKNYHTLQKTYRDKQQVLQERKIKLKALNNFIDILRQQDKLVVVYDEKLFNTLVDKVIIYKDKQVEVHFKNEQVISM

SEQ ID NO: 2392 - protein, 512 aa, Artificial Sequence
  Description of Artificial Sequence: Synthetic polypeptide
MRTNEHNFHNIEEEIKHVAVYLRLSRGEDESELDNHKTRLLNRCELNNWSYELYKEIGSGSTIDDRPVMQKLLTDVEKNLYDAVLVVDLDRLSRGNGTDNDRILYSMKVSETLIVVESPYQVLDANNESDEEIILFKGFFARFEFKQINKRMREGKKLAQSRGQWVNSVTPYGYIVNKTTKKLTPSEEEAKVVIMIKDFFFEGKSTSDIAWELNKRKIKPRRATEWRSSSIANILQNEVYVGNIVYNKSVGNKKPSKSKTRVTTPYRRLPEEEWRRVYNAHQPLYSKEEFDRIKQYFECNVKSHKGSEVRTYALTGLCKTPDGKTMRVTQGKKGTDDDLYLFPKKNKHGDSSIYKGISYNVVYETLKEVILQVKDYLDSVLDQNENKDLVEELKEELMKKEDELETIQKAKNRIVQGFLIGLYDEQDSIELKVEKEKEIDEKEKEIEAIKMKIDNAKTVNNSIKKTKIERLLSDVQSAESEKEINRFYKTLIKEIIVDRTDENEAKIKVNFL

SEQ ID NO: 2393 - protein, 510 aa, Artificial Sequence
  Description of Artificial Sequence: Synthetic polypeptide
MYSKTHKRCDVLLCSILTQNWSKKQMSKKVAIYTRVSTTNQAEEGYSIDEQIDKLKMYCEAMDWKVSEIYTDAGFSGSKLTRPAMEKMITDIGLKKFDTVIVYKLDRLSRSVRDTLYLVKDVFTKNEIDFISLSESIDTSSAMGSLFLTILSAINEFERENIKERMTMGKIGRAKSGKSMMWAKTAFGYSHNQETGILEINPLEASIVEQIFNEYLKGTSITKLRDKLNEDGHIAKELPWSYRTIRQTLDNPVYCGYIKYKNNTFEGLHKPIISHETYLSVQKELEARQQQTYEKNNNPRPFQAKYLLSGIARCGYCGAPLRIVLGHRRKDGSRTMKYQCVNRFPRKTKGVTTYNDNKKCDSGAYDMQWIEDIVLKTLNGFQKSDKKLRKILNIKEESKVDTSGFQKQLKSINNKIQKNSDLYLNDFITMDDLKKRTEMLQGEKKLIQAKINEVDKPSTSEIFDLVKSELGETPISKISYEDKKKIVNNLISKVDVTADNIDIIFKFQLA

SEQ ID NO: 2394 - protein, 510 aa, Artificial Sequence
  Description of Artificial Sequence: Synthetic polypeptide
MYSKTHKRCDVLLCSILTQNWSKKQMSKKVAIYTRVSTTNQAEEGYSIDEQIDKLKMYCEAMDWKVSEIYTDAGFSGSKLTRPAMEKMITDIGLKKFDTVIVYKLDRLSRSVRDTLYLVKDVFTKNEIDFISLSESIDTSSAMGSLFLTILSAINEFERENIKERMTMGKIGRAKSGKSMMWAKTAFGYSHNQETGILEINPLEASIVEQIFNEYLKGTSITKLRDKLNEDGHIAKELPWSYRTIRQTLDNPVYCGYIKYKNNTFEGLHKPIISHETYLKVQKELEVRQQQTYEKNNNPRPFQAKYLLSGIARCGYCGAPLRIVLGHRRKDGSRTMKYQCVNRFPRKTKGVTTYNDNKKCDSGAYDMQWIEDIVLKTLNGFQKSDKKLRKILNIKEETKVDTSGFKKQLKSINNKIQKNSDLYLNDFITMDDLKKRTEMLQGEKKLIQAKINEVDKPSTSEIFDLVKSELGEIPISKISYEDKKKIVNNLISKVDVTADNIDIIFKFQLA

SEQ ID NO: 2395 - protein, 510 aa, Artificial Sequence
  Description of Artificial Sequence: Synthetic polypeptide
MPQPLRALVGARVSVVQGPQKVSQQAQLETARKWAEAQGHEIVGTFEDLGVSASVRPDERPDLGKWLTEEGASKWDVIVWSKMDRAFRSTKHCVDFAQWAEERQKVVMFAEDNLRLDYRPGAAKGIDAMMAELFVYLGSFFAQLELNRFKSRAQDSHRILRQTDRWASGLPPLGYKTVPHPSGKGFGLDTDPDGKDLLYQMAGRLLDGGSLIGIAKWLNETGAMSNRARARVAKGKPADQRPWTVGTVKDALTSLKTQGIKMSGKGKNSKPVLDAKGEQIVLAPPTFDWDTWKQIQDAVALREQAPRSRVHTKNPMLGIGICGKCGSTLAQQHSRKRPAKSDVPGQVVTYRYYRCSRTPVNCDGVFIVADEADEILEDAFLHEWADQPVTRRVFVPGEDHTYELEQINETIARLRRESDAGLIVSDEDEQVYLERMKSLITRRTRLEAMPLRSAGWVEETTGQTYGEAWKTEDHQQLLKDAKVKFILYTNKPRNIEVVVPQDRVAVDLAI

SEQ ID NO: 2396 - protein, 510 aa, Artificial Sequence
  Description of Artificial Sequence: Synthetic polypeptide
MKKVITIEPAKQVTHMVDLPSFTKRRVAGYARVSTDHEDQTTSYEAQMTYYTDYINSRSDWEFVKMYSDEGISGTNTKKRLGFQEMVEDALDGKIDLILTKSVSRFARNTVDSLSTVRKLKEAGVEIYFEKENIWTFDSKGELLITIMSSLAQEESRSISENVTWGRRHQLAEGQVTFSYSQVLGFKKCDTGGFEIDQEEAKIVRYIFHQVLLGNNPNKIARELTAQGIPTPQGKRKWSYGTVKRMLRNEKYKGDALLQKSFTTDFLTKSTKPNEGELPQYYVENNHEAIIKREVFDLVQVELDKLEKKRQTSNIFTGRLFCGDCGSAFGSKVWHSTSKYKRTIYQCNAKYKGEHKCQTPHVTEEEIKGWFLSAMNQLLGNREEIIANTELLIDMAKDTTPLESEIADLERHLETIRQDIEDLVDRNARKAQNQDLYQEQYDTLVTAYQEKQKELQETRSALEEQKSKQLSLDGFIQKFKEQDASSQTSTKNSGRPALSDWISKKIRKSA

SEQ ID NO: 2397 - protein, 509 aa, Artificial Sequence
  Description of Artificial Sequence: Synthetic polypeptide
MRAVAYARFSSDNQREESIEAQIMDIKKYALKNNITVLREYVDEAISGRTFERKSFKRMIEDAKKNMFDLILVHKVDRFARNRYDAAIYKSILKKHNIKIKYVMQPIDDSPEGNLMEGILESFAEYYSENLANEVMKGLKINAKKAQFNGGYPPLGYDIAEDKTYIINEREARIVREIFDLYLDGIGYKKIADILNNKGYKNKRGKPFVFNSIPTILKNDKYCGIYTYNKTSRKYKNGRRNLKKYNKDEDIIRVEDGIPKIISKEKFNTAQQEIKKRTKSRGKKIAVREYILSGLIKCECERKMSGYAQKRSKESNRYFYYRCTGCNNSIRAEKIETIATNFIKEQVFRDIDNLIIKIHKYIADQEAESPSELKYLKNELSNSNNQINNIVKMISNGVTSMHLAKKLEELETYIDGIQQRIGEINRMSVIPEDEIKNWLLELKNSFDNGKNIKKIISVFIKNIEITKEDINIDFFVKAPYKGANSLSVAPSAPPSAPELFAQKCCLKRI

SEQ ID NO: 2398 - protein, 509 aa, Artificial Sequence
  Description of Artificial Sequence: Synthetic polypeptide
MELTPIEFKKDTEKIIPYSEYPYAVYVRISTDKEEQMTSPENQIEICRNWLEKNNYEWNDGSVLYDEQSGTVLIDRAAMQLILEKARRREIKMVVFKSISRLARDLKDALDIKETLISHGVRLVTIEEGYDSLYEGKNDMKFEIFSLFAAQYPKTLSVSISAALAAKVRRGEAIGPAPFGYKIEGENLVINEEEAPTIRQIFKWYVEDGYGFKSITKMLNEEMIKGNVSRPRKKDKWQVTSVQRIIKNPTYAGYFVHGRYTTVKQNGRKKFIENPREKWMVYENHHPAIIPKEMWEAANNKRMKKVKTKVTPWNEFRGIAKCSECGSNMVIIQTGNKKNKGGHWNYIKCSSYRRAGQYGCVNHAPILYEDFRELIIKRLKRKGKNIKLKLESGIVQKRKNEIAALEKEKLSLEQKRKRLIDLYLEDGLISKEEFQEKRKQYEDRIREIEDRIFLLSQEQNTTKEIKTIEDAFQQLENIDQDLYHVFKTLIDQIIVHPDGKIEILYKFKV

SEQ ID NO: 2399 - protein, 508 aa, Artificial Sequence
  Description of Artificial Sequence: Synthetic polypeptide
MNRVCIYLRKSRADEEIEKELGQGETLAKHRKALLKFAKEKNLNIVKIREEIVSGESLIHRPEMLELLKEVEQGMYDAVLCMDLQRLGRGNMQEQGLILEAFKKSNTKIITLQKTYDLNNDFDEEYSEFEAFMSRKELKMINRRLQGGRVRSIQEGNYLSPLPPYGYLIHEEKFSRTLVPNPEQADVVKMIFDMYVNKQMGSSAIANELNKMGYKTYTGRNWASSSVINILKNPVYIGKITWKKKDIKKSADPNKSKDTRQRPRSEWIVSDGKHEPIVGKELFAKAQEIIKNKYHIPYQIVNGPRNPLAGLIICKICGSKMVYRPYKDKEAHIICPNKCGNKSSKFIYVEKRLLQALEEWMQGYELDLQIEEDDSSFAEAQEKQKEALERELHELQKQKNNLHDLLERGIYDIDTFVERSTIVAQRIEETQKSIDVLVQKIEEEKNKRDKEKILPEIRHVLDLYWKTDDIAQKNMLLKSVLEKAEYLKEKKQREDNFELWIYPKLPEK

SEQ ID NO: 2400 - protein, 508 aa, Artificial Sequence
  Description of Artificial Sequence: Synthetic polypeptide
MRVLGRLRLSRSTEESTSIERQREIVTAWAQSNGHTVVGWAEDVDVSGSVDPFDTPSLGPWLDERRGEWDILCAWKLDRLGRDAIRLNKLFGWCQEHGKTVASCSEGIDLSTPVGRLIANVIAFLAEGEREAIRERVTSSKQKLREIGRWGGGKPPYGYKGIPNPNGQGYVLVVDPVAQPVVRRIVDEILDGKPLTRLCTELSEEGYLTPAEYYATLKAGSPRQRAEAGEVTARWRPTALRNLLRSKALRGYAHHKGQTVRDEKGMPVQLAEPLVSADEWELLQEALDRVQADFSGRRVEGVSPLLGVAVCMKCDRPLHHDRYLVKRPYGDYHYRYYRCRDRHGKNLPAEMVEELTEESFLARVGDFPVRERVWVQGDTNWADLKEAVAAYDELMQAAGRAKSVTAKERLQRQLDALDERIAELESAPTTEAHWEYQPTGGTYRDAWEAADTDGRRELLKRSGITVAVFIDGVEGRRSKYNPGALHFDIRVPEELTRRLGLPDPVPSQ

SEQ ID NO: 2401 - protein, 507 aa, Artificial Sequence
  Description of Artificial Sequence: Synthetic polypeptide
METMPQPLRALVGARVSVVQGPQKVSQQAQLETARKWAEAQGHEIVGTFEDLGVSASVRPDERPDLGKWLTDEGASKWDVIVWSKMDRAFRSTKHCVDFAQWAEERQKVVMFAEDNLRLDYRPGAAKGIDAMMAELFVYLGSFFAQLELNRFKSRAQDSHRVLRQTDRWASGLPPLGYKTVPHPSGKGFGLDTDEDTKAVLYDMAGKLLDGWSLIGIAKDLNDRGVLGSRSRARLAKGKPIDQAPWNVSTVKDALTNLKTQGIKMTGKGKHAKPVLDDKGEQIVLAPPTFDWDTWKQIQDAVALREQAPRSRVHTKNPMLGIGICGKCGATLAQQHSRKKSDKSVVYRYYRCSRTPVNCDGVFIVADEADTLLEEAFLYEWADQPVTRRVFVPGEDHTYELEQINETIARLRRESDAGLIVSDEDERIYLERMRSLITRRTKLEAMPRRSAGWVEETTGQTYGEAWETEDHQQLLKDAKVKFILYSNKPRNIEVVVPQDRVAVDLAI

SEQ ID NO: 2402 - protein, 507 aa, Artificial Sequence
  Description of Artificial Sequence: Synthetic polypeptide
METMPQPLRALVGARVSVVQGPQKVSQQAQLETARKWAEAQGHEIVGTFEDLGVSASVRPDDRPDLGKWLTDEGASKWDVIVWSKMDRAFRSTKHCVDFAQWAEERQKVVMFAEDNLRLDYRPGAAKGIDAMMAELFVYLGSFFAQLELNRFKSRAQDSHRVLRQTDRWASGLPPLGYKTVPHPSGKGFGLDTDEDTKAVLYDMAGKLLDGWSLIGIAKDLNDRGVLGSRSRARLAKGKPIDQAPWNVSTVKDALTNLKTQGIKMTGKGKHAKPVLDDKGEQIVLAPPTFDWDTWKQIQDAVALREQAPRSRVHTKNPMLGIGICGKCGATLAQQHSRKKSDKSVVYRYYRCSRTPVNCDGVFIVADEADTLLEEAFLYEWADQPVTRRVFVPGEDHTYELEQINETIARLRRESDAGLIVSDEDERIYLERMRSLITRRTKLEAMPRRSAGWVEETTGQTYGEAWETEDHQQLLKDAKVKFILYSNKPRNIEVVVPQDRVAVDLAI

SEQ ID NO: 2403 - protein, 507 aa, Artificial Sequence
  Description of Artificial Sequence: Synthetic polypeptide
METMPQPLRALVGARVSVVQGPQKVSQQAQLETARKWAEAQGHEIVGTFEDLGVSASVRPDDRPDLGKWLTDEGASKWDVIVWSKMDRAFRSTKHCVDFAQWAEERQKVVMFAEDNLRLDYRPGAAKGIDAMMAELFVYLGSFFAQLELNRFKSRAQDSHRVLRQTDRWASGLPPLGYKTVPHPSGKGFGLDTDEDTKAVLYDMAGKLLDGWSLIGIAKDLNDRGVLGSRSRARLAKGKPIDQAPWNVSTVKDALTNLKTQGIKMTGKGKHAKPVLDAKGEQIVLAPPTFDWDTWKQIQDAVALREQAPRSRVHTKNPMLGIGICGKCGATLAQQHSRKKSDKSVVYRYYRCSRTPVNCDGVFIVADEADTLLEEAFLYEWADQPVTRRVFVPGEDHTYELEQINETIARLRRESDAGLIVSDEDERIYLERMRSLITRRTKLEAMPRRSAGWVEETTGQTYGEAWETEDHQQLLKDAKVKFILYSNKPRNIEVVVPQDRVAVDLAI

SEQ ID NO: 2404 - protein, 507 aa, Artificial Sequence
  Description of Artificial Sequence: Synthetic polypeptide
MYPTFVRVLGRLRLSRSTEESTSIERQREIVTAWADSNGHTVVGWAEDVDVSGAIDPFDTPSLGVWLDERRGEWDILCAWKLDRLGRDAIRLNKLFLWCQEHGKTVTSCSEGIDLGTPVGRLIANVIAFLAEGEREAIRERVASSKQKLREIGRWGGGKPPFGYMGVRNPDGQGHILVVDPVAKPVVRRIVEDILEGKPLTRLCTELTEERYLTPAEYYATLKAGAPRQQAEEGEVTAKWRPTAVRNLLRSKALRGHAHHKGQTVRDDQGRAIQLAEPLVDADEWELLQETLDGIAADFSGRRVEGASPLSGVAVCMTCDKPLHHDRYLVKRPYGDYPYRYYRCRDRHGKNVPAETLEELVEDAFLQRVGDFPVRERVWVQGDTNWADLKEAVAAYDELVQAAGRAKSATARERLQRQLDILDERIAELESAPNTEAHWEYQRTGGTYRDAWENSDADERRELLRRSGIVVAVHIDGVEGRRSKHNPGALHFDIRVPHELTQRLIAP

SEQ ID NO: 2405 - protein, 507 aa, Artificial Sequence
  Description of Artificial Sequence: Synthetic polypeptide
METMPEPLRALVGARVSVVQGPQKVSQQAQLETARKWAEAQGHEIVGTFEDLGVSASVRPDDRPDLGKWLTDEGASKWDVIVWSKMDRAFRSTKHCVDFAQWAEERQKVVMFAEDNLRLDYRPGAAKGIDAMMAELFVYLGSFFAQLELNRFKSRAQDSHRVLRQTDRWASGLPPLGYKTVPHPSGKGFGLDTDEDTKAVLYDMAGKLLDGWSLIGIAKDLNDRGVLGSRSRARLAKGKPIDQAPWNVSTVKDALTNLKTQGIKMTGKGKHAKPVLDEKGEQIVLAPPTFDWDTWKQIQDAVALREQAPRSRVHTKNPMLGIGICGKCGATLAQQHSRKKSDKSVVYRYYRCSRTPVNCDGVFIVADEADTLLEEAFLYEWADQPVTRRVFVPGEDHTYELEQINETIARLRRESDAGLIVSDEDERIYLERMRSLITRRTKLEAMPRRSAGWVEETTGQTYGEAWETEDHQQLLKDAKVKFILYSNKPRNIEVVVPQDRVAVDLAI

SEQ ID NO: 2406 - protein, 504 aa, Artificial Sequence
  Description of Artificial Sequence: Synthetic polypeptide
MRALVVIRLSRVTDATTSPERQLESCRQLCAQRGWDVVGVAEDLDVSGAVDPFDRKRRPNLARWLAFEEQPFDVIVAYRVDRLTRSIRHLQQLVHWAEDHKKLVVSATEAHFDTTTPFAAVVIALMGTVAQMELEAIKERNRSAAHFNIRAGKYRGSLPPWGYLPTRVDGEWRLVPDPVQRERILEVYHRVVDNHEPLHLVAHDLNRRGVLSPKDYFAKLQGREPQGREWSATALKRSLISEAMLGYATLNGKTVRDDDGAPLVRAAPILTREQLEALRAELVKTDRTKPAVSTPSLLLRVLFCAVCGEPAYKFAGGGRKHPRYRCRSMGFPKHCGNGTVAMAEWDAFCEEQVLDLLGDAERLEKVWVAGSDSAVELAEVNAELVDLTSLIGSPAYRAGSPQREALDARIAALAARQEELEGLEARPSGWEWRETGQRFGDWWRDQDTAGKNTWLRSMNVRLTFDVRGGLTRTIDFGDLQEYEQHLRLGAALDLVNAEKPPTGR

SEQ ID NO: 2407 - protein, 504 aa, Artificial Sequence
  Description of Artificial Sequence: Synthetic polypeptide
MRALVVIRLSRVTDATTSPERQLESCQQLCAQRGWDVVGVAEDLDVSGAVDPFDRKRRPNLARWLSFEEQPFDVIVAYRVDRLTRSIRHLQQLVHWAEDHKKLIVSATESHFDTTSPFAAVVIALMGTVAQMELEAIKERNRSAAHFNIRAGKYRGSLPPWGYMPARVDGEWRLLVDPVQRERILEVYHRVVDNHEPLHQIAHDLNQRGILSPKDYFAKLQGREPKGREWSATALKRSLISEAMLGYATLNGKTVRDDDGAPLVRADPILTREQLESLRAELVKADRTKPAVSTPSLLLRVLFCAVCGEPAYKFTGGGRKNARYRCRSWGWAQRCGNGTVAMAEWDAFCEEQVLDLLGDAERLEKVWVAGSDSAVELAEVNAELVDLTSLIGSPAYRVGSPQREALDARIAALAARQEELEGLEARPSGWEWRETGQRFGDWWREQDTPGKNTWLRSMNVRLTFDVRGGLTRTIDFGDLQEYEQHLRLGSALDLVNAEKPPTGR

SEQ ID NO: 2408 - protein, 504 aa, Artificial Sequence
  Description of Artificial Sequence: Synthetic polypeptide
MRALVVIRLSRVTDATTSPERQLESCQQLCAQRGWDVVGVAEDLDVSGAVDPFDRKRRPNLARWLAFEEQPFDVIVAYRVDRLTRSIRHLQQLVHWAEDHKKLVVSATEAHFDTTTPFAAVVIALMGTVAQMELEAIKERNRSAAHFNIRAGKYRGSLPPWGYLPTRVDGEWRLVPDPVQRERILEVYHRVVDNHEPLHLVAHDLNRRGVLSPKDYFAKLQGREPQGREWSATALKRSLISEAMLGYATLNGKTVRDDDGAPLVRSEPILTREQLEALRAELVKTDRTKPAVSTPSLLLRVLFCAVCGEPAYKFTGGGRKNARYRCRSWGWAQRCGNGTVAMAEWDAFCEEQVLDLLGDSERLEKVWVAGSDSAVELAEVNAELVDLTSLIGSPAYRVGSPQREALDARIAALAARQEELEGLEARPSGWEWRETGQRFGDWWRDQDTAGKNTWLRSMNVRLTFDVRGGLTRTIDFGDLQEYEQHLRLGSALDLVNAEKPPTGR

SEQ ID NO: 2409 - protein, 504 aa, Artificial Sequence
  Description of Artificial Sequence: Synthetic polypeptide
MRVLVVIRLSRVTDATTSPERQLESCRQLCAQRGWDVVGVAEDLDVSGAVDPFDRKRRPNLARWLSFEEQPFDVIVAYRVDRLTRSIRHLQQLVHWAEDHKKLIVSATEAHFDTTSPFAAVVIALMGTVAQMELEAIKERNRSAAHFNIRAGKYRGSLPPWGYMPARVDGEWRLVVDPVQRERILEVYHRVVDNHEPLHLVAHDLNQRGILSPKDYFAQLQGREPKGREWSATALKRSLISEAMLGYTTLNGKTVRDDDGAPLVRAEPILTREQLEALRAELVKTDRTKPAVATPSLLLRVLFCAVCGEPAYKFAGGGRKHPRYRCRSMGFPKHCGNGTVAMAEWDAFCEEQVLDLLGDAERLEKVWVAGSDSAVELAEVNAELVDLTSLIGSPAYRVGSPQREALDARIAALAARQEELEGLEARPSGWEWRETGQRFGDWWREQDIAAKNTWLRSMNVRLTFDVRGGLTRTIDFGDLQEYEQHLRLGTALDLVNAEKPPTGR

SEQ ID NO: 2410 - protein, 504 aa, Artificial Sequence
  Description of Artificial Sequence: Synthetic polypeptide
MRALVVIRLSRVTDATTSPERQLESCQQLCAQRGWDVVGVAEDLDVSGAVDPFDRKRRPNLARWLAFEEQPFDVIVAYRVDRLTRSIRHLQQLVHWAEDHKKLVVSATEAHFDTTTPFAAVVIALMGTVAQMELEAIKERNRSAAHFNIRAGKYRGSLPPWGYLPTRVDGEWRLVPDPVQRERILEVYHRVVDNHEPLHLVAHDLNQRGILSPKDYFAKLQGREPQGREWSATALKRSLISEAMLGYATLNGKTVRDDDGAPLVRAEPILTREQLEALRAELVKTSRAKPAVATPSLLLRVLFCAVCGEPAYKFAGGGRKHPRYRCRSMGFPKHCGNGTVAMAEWDAFCEEQVLDLLGDAERLEKVWVAGSDSAVELAEVNAELVDLTSLIGSPAYRVGSPQREALDARIAALAARQEELEGLEARPSGWEWRETGQRFGDWWREQDIAAKNTWLRSMNVRLTFDVRGGLTRTIDFGDLQEYEQHLRLGTALDLVNAEKPPTGR

SEQ ID NO: 2411 - protein, 504 aa, Artificial Sequence
  Description of Artificial Sequence: Synthetic polypeptide
MRALVVIRLSRVTDATTSPERQLESCQQLCAQRGWDVVGVAEDLDVSGAVDPFDRKRRPNLARWLAFEEQPFDVIVAYRVDRLTRSIRHLQQLVHWAEDHKKLVVSATEAHFDTTTPFAAVVIALMGTVAQMELEAIKERNRSAAHFNIRAGKYRGSLPPWGYLPTRVDGEWRLVPDPVQRERILEVYHRVVDNHEPLHLVAHDLNQRGVLSPKDYFAKLQGREPQGREWSATALKRSLISEAMLGYATLNGKTVRDDDGAPLVRAEPILTREQLEALRAELVKADRTKPAVSTPSLLLRVLFCAVCGEPAYKFTGGGRKNARYRCRSWGWAQRCGNGTVAMAEWDAFCEEQVLDLLGDSERLEKVWVAGSDSAVELAEVNAELVDLTSLIGSPAYRAGSPQREALDARIAALAARQEELEGLEARPSGWEWRETGQRFGDWWRDQDTAGKNAWLRSMNVRLTFDVRGGLTRTIDFGDLQEYEQHLRLGSALDLVNAEKPPTGR

SEQ ID NO: 2412 - protein, 504 aa, Artificial Sequence
  Description of Artificial Sequence: Synthetic polypeptide
MPQPLRALVGARVSVVQGPQKVSQQAQLETARKWAEAQGHEIVGTFEDLGVSASVRPDERPDLGKWLTDEGASKWDVIVWSKMDRAFRSTKHCVDFAQWAEERQKVVMFAEDNLRLDYRPGAAKGIDAMMAELFVYLGSFFAQLELNRFKSRAQDSHRVLRQTDRWASGLPPLGYKTVPHPSGKGFGLDTDEDTKAVLYDMAGKLLDGWSLIGIAKDLNDRGVLGSRSRARLAKGKPIDQAPWNVSTVKDALTNLKTQGIKMTGKGKHAKPVLNDKGEQIVLAPPTFDWDTWKQIQDAVALREQAPRSRVHTKNPMLGIGICGKCGATLAQQHSRKKSDKSVVYRYYRCSRTPVNCDGVFIVADEADTLLEEAFLYEWADQPVTRRVFVPGEDHTYELEQINETIARLRRESDAGLIVSDEDERIYLERMRSLITRRTKLEAMPRRSAGWVEETTGQTYGEAWETEDHQQLLKDAKVKFILYSNKPRNIEVVVPQDRVAVDLAI

SEQ ID NO: 2413 - protein, 504 aa, Artificial Sequence
  Description of Artificial Sequence: Synthetic polypeptide
MRALVVIRLSRVTDATTSPERQLESCQQLCAQRGWDVVGVAEDLDVSGAVDPFDRKRRPNLARWLAFEEQPFDVIVAYRVDRLTRSIRHLQQLVHWAEDHKKLVVSATEAHFDTTTPFAAVVIALMGTVAQMELEAIKERNRSAAHFNIRAGKYRGSLPPWGYLPTRVDGEWRLVPDPVQRERILEVYHRVVDNHEPLHLVAHDLNRRGVLSPKDYFAKLQGREPRGREWSATALKRSLISEAMLGCATLNGKTVRDDDGAPLVRAEPILTREQLEALRAELVKTDRTKPAVATPSLLLRVLFCAVCGEPAYKFTGGGRKNARYRCRSMGFPKHCGNGTVAMAEWDAFCEEQVLDLLGDAERLEKVWVAGSDSAVELAEVNAELVDLTSLIGSPAYRAGSPQREALDSRIAALAARQEELEGLEARPSGWEWRETGQRFGDWWRDQDTAGKNTWLRSMNVRLTFDVRGGLTRTIDFGDLQEYEQHLRLGAALYLVNAEKPPTGR

SEQ ID NO: 2414 - protein, 504 aa, Artificial Sequence
  Description of Artificial Sequence: Synthetic polypeptide
MRALVVIRLSRVTDTTTSPERQLESCQQLCAQRGWDVVGVAEDLDVSGAVDPFDRKRRPNLARWLSFEEQPFDVIVAYRVDRLTRSIRHLQQLVHWAEDHKKLIVSATEAHFDTTSPFAAVVIALMGTVAQMELEAIKERNRSAAHFNIRAGKYRGSLPPWGYMPARVEGEWRLLVDPVQRERILEVYHRVVDNHEPLHQIAHDLNQRGLPSPKDYFAKLQGREPKGREWSATALKRSLISEAMLGYTTLNGKTVRDDDGAPLVRSEPILTREQLEALRAELVKTDRTKPAVSTPSLLLRVLFCAVCGEPAYKFTGGGRKNARYRCRSWGWAQRCGNGTVAMAEWDAFCEEQVLDLLGDAERLEKVWVAGSDSAVELAEVNAELVDLTSLIGSPAYRAGSPQREALDARIAALAARQEELEGLEARPSGWEWRETGQRFGDWWRDQDTAGKNTWLRSMNVRLTFDVRGGLTRTIDFGDLQEYEQHLRLGTALDLVNAEKPPTGR

SEQ ID NO: 2415 - protein, 504 aa, Artificial Sequence
  Description of Artificial Sequence: Synthetic polypeptide
MPQPLRALVGARVSVVQGPQKVSQQAQLETARKWAEAQGHEIVGTFEDLGVSASVRPDERPDLGKWLTDEGASKWDVIVWSKMDRAFRSTKHCVDFAQWAEERQKVVMFAEDNLRLDYRPGAAKGIDAMMAELFVYLGSFFAQLELNRFKSRAQDSHRVLRQTDRWASGLPPLGYKTVPHPSGKGFGLDTDEDTKAVLYDMAGKLLDGWSLIGIAKDLNDRGVLGSRSRARLAKGKPIDQAPWNVSTVKDALTNLKTQGIKMTGKGKHAKPVLDDKGEQIVLAPPTFDWDTWKQIQDAVALREQAPRSRVHTKNPMLGIGICGKCGATLAQQHSRKKSDKSVVYRYYRCSRTPVNCDGVFIVADEADTLLEEAFLYEWADQPVTRRVFVPGEDHTYELEQINETIARLRRESDAGLIVSDEDERIYLERMRSLITRRTKLEAMPRRSAGWVEETTGQTYGEAWEIEDHQQLLKDAKVKFILYSNKPRNIEVVVPQDRVAVDLAI

SEQ ID NO: 2416 - protein, 504 aa, Artificial Sequence
  Description of Artificial Sequence: Synthetic polypeptide
MRALVVIRLSRVTDATTSPERQLESCQQLCAQRGWDVIGVAEDLDVSGAVDPFDRKRRPNLARWLAFEEQPFDVIVAYRVDRLTRSIRHLQQLVHWAEDHKKLVVSATEAHFDTTTPFAAVVIALMGTVAQMELEAIKERNRSAAHFNIRAGKYRGSLPPWGYLPTRVDGEWRLVPDPVQRERILEVYHRVVDNHEPLHLVAHDLNRRGVLSPKDYFAKLQGREPQGREWSATALKRSLISEAMLGYATLNGKTVRDDDGAPLVRSEPILTREQLEALRAELVKTDRTKPAVSTPSLLLRVLFCAVCGEPAYKFTGGGRKNARYRCRSWGWAQRCGNGTVAMAEWDAFCEEQVLDLLGDAERLEKVWVAGSDSAVELAEVNAELVDLTSLIGSPAYRAGSPQREALDARIAALAARQEELEGLEARPSGWEWRETGQRFGDWWRDQDTAGKNAWLRSMNVRLTFDVRGGLTRTIDFGDLQEYEQHLRLGSALDLVNAEKPPTGR

SEQ ID NO: 2417 - protein, 504 aa, Artificial Sequence
  Description of Artificial Sequence: Synthetic polypeptide
MPQPLRALVGARVSVVQGPQKVSQQAQLETARKWAEAQGHEIVGTFEDLGVSASVRPDERPDLGKWLTDEGASKWDVIVWSKMDRAFRSTKHCVDFAQWAEERQKVVMFAEDNLRLDYRPGAAKGIDAMMAELFVYLGSFFAQLELNRFKSRAQDSHRVLRQTDRWASGLPPLGYKTVPHPSGKGFGLDTDEDTKAVLYDMAGKLLDGWSLIGIAKDLNDRGVLGSRSRARLAKGKPIDQAPWNVSTVKDALTNLKTQGIKMTGKGKHAKPVLDDKGEQIVLAPPTFDWDTWKQIQDAVALREQAPRSRVHTKNPMLGIGICGKCGATLAQQHSRKKSDKSVVYRYYRCSRTPVNCDGVFIVADEADTLLEEAFLYEWADQPVTRRVFVPGEDHTYELEQINETIARLRRESDAGLIVSDEDERIYLERMRSLITRRTKLEAMPRRSAGWVEETTGQTYGEAWETDDHQQLLKDAKVKFILYSNKPRNIEVVVPQDRVAVDLAI

SEQ ID NO: 2418 - protein, 503 aa, Artificial Sequence
  Description of Artificial Sequence: Synthetic polypeptide
MRALVVIRLSRVTDATTSPERQLESCQQLCVQRGWEVVGVAEDLDVSGAVDPFDRKRRPNLARWLAFEDEPFDVIVAYRVDRLTRSIRHLQQLVHWAEDHKKLVVSATEPHFDTTSPFAAVVIALMGTVAQMELEAIKERNRSAAHFNIRAGKYRGSLPPWGYMPARVDGEWRLLVDPVQRERILEVYHRVVDNHEPLHLVAHDLNQRGILSPKDYFAKLQGREPQGREWSATALKRSLISEAMLGYATLNGKTVRDDDGAPLVRAEPILTREQLESLRAELVKADRAKPAVSTPSLLLRVLFCAVCGEPAYKFDAGRKIPRYRCRSFGFAQRCGNGTVPIAEWDAFCEEQVLDLLGDAERLEKVWVAGSDSAVELAEVNAELVDLTSLIGSPAYRVGSPQREALDSRIAALAARQEELEGLEARPSGWEWRETGQRFADWWAAQDTAGKNTWLRSMNVRLTFDVRGGLTRTIDFGDLQEYEQHLRLGAALDLVNAEKPPTGR

SEQ ID NO: 2419 - protein, 502 aa, Artificial Sequence
  Description of Artificial Sequence: Synthetic polypeptide
MNKKICIYLRKSRADEELEKTLGEGETLSKHRNALLKFAKENKLNVTDIKEEIVSGDSLFFRPKMLELLKEVENNMYYGVLVMDIDRLGRGGMKDQGIILDAFKESKTKIITPLKTYDLDNEMDEEITEFKTFFSRRELKTINRRMQGGRIRSIEEGNYIATNPPYGYDISFIKKNRTLKINEDEAPAINLIFKLYIEGNGASAIANELNNLRYKTKLGNNFSPSSVLTIIKNPIYIGKIPWKRKDIKKSKTPGKVKDTRTRDKSEWIIADGKHPGIVTNEIWESAQKILKGRYHIPYQLSNAPVNPFAGIISCGICGKKMVMRKARGINRLMCIYKCGNKSTRFDNVESDCLEALKDYLSNYSAEIKNSIKKEDIDMYSIQITNLKKELTTLNNQRLKLFDLLERNLYDEDTFLERSKNINDRIENITHTLKSLEKKVKKNSYTSYEEDIKHFKNVLDAYNLTKDVSKKNNLLKSILYKIEYTKTEKGKDYEIKLFPKLRK

SEQ ID NO: 2420 - protein, 502 aa, Artificial Sequence
  Description of Artificial Sequence: Synthetic polypeptide
MNKICIYLRKSRADEELEKTLGEGETLSKHRKALLKFAKEKKLNIVEIKEEIVSGESLFFRPKMLELLKEVENKQYTGVLVMDMQRLGRGNMQDQGIILETFKKSNTKIITPMKTYDLSDDFDEEYTEFEAFMSRKELKMINRRMQGGRVRSVEDGNYIATNPPLGYDIHWIKKSRTLKINPHECEIIKLIFKLYTEGNGAGSIAEHLNNLGYKTKFNNNFSRSSVLFILKNPIYIGKVTWKKKEIKKSKNPNKVKDTRTRDKSEWIVVDGKHEPMISMKMWNKAQEILNNKYHIPYQLVNGPANPLAGIVICSKCKFKMVMRKLKGVDRLLCRNNKCDNISNRYDSTEKAIIQALERYLKEYRINISNQNKTSDIKPYERQVNILEKELAALNEQKLKLFDFLERGIYDENTFLERSKNIEERITKTSSGIEKINDIINKEKKVVKEEDVIKFQKLLDGYKNTDDIKLKNELMKKLVNKVEYTKNKRGDTFGIDIFPKLKP

SEQ ID NO: 2421 - protein, 502 aa, Artificial Sequence
  Description of Artificial Sequence: Synthetic polypeptide
MNKICIYLRKSRADEELEKTLGEGETLSKHRKALLKFAKEKKLNIVEIKEEIVSGESLFFRPKMLELLKEVENKQYTGVLVMDMQRLGRGNMQDQGIILETFKKSNTKIITPMKTYDLSDDFDEEYTEFEAFMSRKELKMINRRMQGGRVRSVEDGNYIATNPPLGYDIHWIKKSRTLKINTHECEIIKLIFKLYTEGNGAGSIAEHLNNLGYKTKFNNNFSRSSVLFILKNPIYIGKVTWKKKEIKKSKNPNKVKDTRTRDKSEWIVVDGKHEPIISMKIWNKAQEILNNKYHIPYQLVNGPANPLAGIVICSKCKFKMVMRKLKGIDRLLCRNNKCNNISNRYDSTEKAIVQALERYLNEYRINISNKNKTSNIKPYERQINILEKELAALNEQKLKLFDFLERGIYDENTFLERSKNIEKRITKTSSGIEKINDIINKEKKVVKEEDVIKFQKLLDGYKNTDDIKLKNELMKKLVNKVEYTKDKRGETFGIDIFPKLKP

SEQ ID NO: 2422 - protein, 502 aa, Artificial Sequence
  Description of Artificial Sequence: Synthetic polypeptide
MNKICIYLRKSRADEELEKTLGEGETLSKHRKALLKFAKEKKLNIVEIKEEIVSGESLFFRPKMLELLKEVENKQYTGVLVMDMQRLGRGNMQDQGIILETFKKSNTKIITPMKTYDLSDDFDEEYTEFEAFMSRKELKMINRRMQGGRVRSVEDGNYIATNPPLGYDIHWIKKSRTLKINPHECEIIKLIFKLYTEGNGAGSIAEHLNNLGYKTKFNNNFSRSSVLFILKNPIYIGKVTWKKKEIKKSKNPNKVKDTRTRDKSEWIVVDGKHEPMISMKMWNKAQEILNNKYHIPYQLVNGPANPLAGIVICSKCKFKMVMRKLKGVDRLLCRNNKCDNISNRYDSTEKAIVQALERYLKEYRINISNRNKTSDIKPYERQINILEKELAALNEQKLKLFDFLERGIYDENTFLERSKNIEERITKTSLGIEKINDIINKEKKVVKEEDVIKFQKLLDGYKNTDDIKLKNELMKKLVNKVEYTKNKRGETFGIDIFPKLKP

SEQ ID NO: 2423 - protein, 502 aa, Artificial Sequence
  Description of Artificial Sequence: Synthetic polypeptide
MRVLGRLRLSRSTEESTSIERQREIVTAWADSNGHTVVGWAEDVDVSGAVDPFDTPSLGPWLDERRGEWDILCAWKLDRLGRDAIRLNKLFLWCQENGKTVASTSEGIDLGTPVGRLIANVIAFLAEGEREAIRERVTSSKQKLREVGRWGGGKPPFGYMGIPNPDGQGYILVVDPIAKPVVRRIVDDVVDGKPLTRLCAELTEERYLTPAEYYATLKAGAPRQQADPGEVIAKWRPTAVRNLLRSKALRGHAHHRGQTVRDDQGRPVRLAEPLVDSDEWELLQETLDGIQADFSGRRVEGASPLSGVAVCMTCGRPLHFSRHMVKRPYGDYPYQYYRCQDRHGKNVPADVLDELVEENFLLKVGDYPVRERVWVQGDTNWADMKEAVAAYDELVQAAGRAKSATAKERLQRQLDALDTRIAELESAPATEAHWEYRETGSTYRDAWENSDTDQRRELLKKSGITVAVGIDGVEGRRSKHNPGALRFDIRVPAELTQRLGAS

SEQ ID NO: 2424 - protein, 502 aa, Artificial Sequence
  Description of Artificial Sequence: Synthetic polypeptide
MRVLGRLRLSRSTEESTSIERQREIVTAWAESNGHTLVGWAEDVDVSGAIDPFDTPSLGPWLDERRGEWDILCAWKLDRLGRDAIRLNKLFGWCQEHGKTVASCSEGIDLSTPVGRLIANVIAFLAEGEREAIRERVTSSKQKLREVGRWGGGKPPFGYMGIPNPDGQGHILVVDPVAKPVVRRIVDDILDGKPLTRLCTELTEERYLTPAEYYATLKAGAPRQKAEPDETPAKWRPTALRNLLRSKALRGYAHHKGQTVRDLKGQPVRLAEPLVDADEWELLQETLDRVQANWSGRRVEGVSPLSGVVVCITCDRPLHHDRYLVKRPYGDYPYRYYRCRDRHGKNLPAEMVETLMEESFLARVGDYPVRERVWVQGDTNWADLKEAVAAYDELVQAAGRAKSATAKERLQRQLDALDERIAELESAPATEAHWEYRPTGGTYRDAWETADTDERREILRRSGIVLAVGVDGVDGRRSKHNPGALHFDFRVPEELTQRLGVS

SEQ ID NO: 2425 - protein, 502 aa, Artificial Sequence
  Description of Artificial Sequence: Synthetic polypeptide
MRVLGRLRLSRSTEESTSIERQREIVTAWADSNGHTVVGWAEDVDVSGAIDPFDTPSLGVWLDERRGEWDILCAWKLDRLGRDAIRLNKLFLWCQEHGKTVTSCSEGIDLGTPVGRLIANVIAFLAEGEREAIRERVASSKQKLREIGRWGGGKPPFGYMGVRNPDGQGHILVVDPVAKPVVRRIVEDILEGKPLTRLCTELTEERYLTPAEYYATLKAGAPRQQAEEGEVTAKWRPTAVRNLLRSKALRGHAHHKGQTVRDDQGRAIQLAEPLVDADEWELLQETLDGIAADFSGRRVEGASPLSGVAVCMTCDKPLHHDRYLVKRPYGDYPYRYYRCRDRHGKNVPAETLEELVEDAFLQRVGDFPVRERVWVQGDTNWADLKEAVAAYDELVQAAGRAKSATARERLQRQLDILDERIAELESAPNTEAHWEYQPTGGTYRDAWENSDADERRELLRRSGIVVAVHIDGVEGRRSKHNPGALHFDIRVPHELTQRLIAP

SEQ ID NO: 2426 - protein, 502 aa, Artificial Sequence
  Description of Artificial Sequence: Synthetic polypeptide
MPTYDRSMRVIGRLRISRQSEESTSIDRQRELIQNWADTHDHEIVGWAEDIDVSGSVDPFEAPGLGPWLKRDRLGEWDILVAWKLDRIARRAIAINRVFHLCQEHDKTLVCISDNIDLSTWVGRLIANVIAGVAEGELEAIRERTLASHRKLRDLGRWPGGRPAYGYKAVERTDGPGWKLVHDEYSATIMREIVDRTLQGEAGNAIAQDLQERGVLPPAEYRRQMNGEKLRGGEWMGQVIRKMLKSRTLLGHVTHQQVTVINEKEGTPILKGEPLVSLEEWEELQAMLGGSSRPKNHNRTTAASPMLDVALCAECEKPLHLRTQRTQRKEKLHVHRYYYCPDKHGSAIRGEDVENAVENQFLEDFGDVPAMERVFREGENHEIEIKQAIRSIEALTPLLGTATSGTVLKSLTDQISALSNRVTYLESLPKAESGYILRPTGKTYREEWEERDEQGRRALLRRSGITATFRLTGKGRGGRNPAPGALEFNLRVPEDAHARMAS

SEQ ID NO: 2427 - protein, 502 aa, Artificial Sequence
  Description of Artificial Sequence: Synthetic polypeptide
MPTYDRSMRVIGRLRISRQSEESTSIDRQRELIQNWADTHDHEIVGWAEDIDVSGSIDPFEAPGLGPWLKRDRLGEWDILVAWKLDRIARRAIAINRVFHLCQEHDKTLVCISDNIDLSTWVGRLIANVIAGVAEGELEAIRERTLASHRKLRELGRWPGGRPAYGYKAVERTDGPGWKLVHDEYSATIMREIVDRTLQGEAGNAIAQDLQERGVLTPAEYRREMNGEKLRGGEWMGQVIRKMLKSRTLLGHVTHQQVTVINEKEGTPILKGEPLVSLEEWEELQAMLGGSSRPKNHNRTTAASPMLDVALCAECEKPLHLRTQRTQRKEKLHVHRYYYCPDKHGSAIRGEDVENAVENQFLEDFGDLPAMERVFREGENHEIEIKQAIQSIEALTPLLGAATSGTVLKSLTDQISALSNRVTYLESLPKAESGYILRPTGKTYREEWEERDEQGRRALLRRSGITATFMLTGKGRGGRNPAPGALQFNLRVPADAQERLAS

SEQ ID NO: 2428 - protein, 502 aa, Artificial Sequence
  Description of Artificial Sequence: Synthetic polypeptide
MPTYDRSMRVIGRLRISRQTEESTSIERQRELIQNWADTHDHEIVGWAEDKDVSGSVDPFDTPGLGPWLKRDRLDDWDILVAWKLDRIARRAIAINRVFHLCQEHDKTLVCISDSIDLSTWVGRLIANVIAGVAEGELEAIRERTLASHRKLRELGRWPGGRPAYGYKAVERTDGPGWKLVHDEYSATIMREIVDRTLQGEAGNAIAQDLQARGVLPPAEYRRQMNGEKLRGGEWMGQVIRKMLKSRTLLGHVTHQQVTVINEKEGTPILKGEPLVSLEEWEELQAMLGGSSRPKNHNRTTAASPMLDVALCAECEKPLHLRTQRTQRKEKLHVHRYYYCPDKHGSAIRGEDVENAVENQFLEDFGDLPAMERVFREGENHEIEIKQAIQSIEALTPLLGAATSGTVLKSLTDQISAISNRVTYLESLPKAESGYILRPTGKTYREEWEERDEQGRRALLRRAGITATFRLTGKGRGGRNPAPGALEFHLRVPEDAHDRMAS

SEQ ID NO: 2429 - protein, 502 aa, Artificial Sequence
  Description of Artificial Sequence: Synthetic polypeptide
MPTYDRSMRVIGRLRISRQTEESTSIERQRELIQNWADTHDHEIVGWAEDKDVSGSVDPFDTPGLGPWLKRDRLDDWDILVAWKLDRIARRAIAINRVFHLCQEHDKTLVCISDNIDLSTWVGRLIANVIAGVAEGELEAIRERTLASHRKLRELGRWPGGRPAYGYKAVERTDGPGWKLVHDEYSATIMREIVDRTLQGEAGNAIAQDLQARGVLPPAEYRRQMNGEKLRGGEWMGQVIRKMLKSRTLLGHVTHQQVTVINEKEGTPILKGEPLVSLEEWEELQAMLGGSSRPKNHNRTTAASPMLDVALCAECEKPLHLRTQRTQRKEKLHVHRYYYCPDKHGSAIRGEDVENAVENQFLEDFGDLPAMERVFREGENHEIEIKQAIQSIEALTPLLGAATSGTVLKSLTDQISAISNRVTYLESLPKAESGYILRPTGKTYREEWEERDEQGRRALLRRAGITATFRLTGKGRGGRNPAPGALEFHLRVPEDAHDRMAS

SEQ ID NO: 2430 - protein, 502 aa, Artificial Sequence
  Description of Artificial Sequence: Synthetic polypeptide
MRVLGRLRLSRSTEESTSIERQREIVTAWAQSNGHTLVGWAEDVDVSGAIDPFDTPSLGPWLDERRGEWDILCAWKLDRLGRDAIRLNKLFGWCQEHGKTVASCSEGIDLSTPVGRLIANVIAFLAEGEREAIRERVTSSKQKLREVGRWGGGKPPFGYMGVPNPDGQGHILVVDPVAKPVVRRIVDDILDGKPLTRLCTELTEERYLTPAEYYATLKAGAPRQKAEPDETPAKWRPTALRNLLRSKALRGYAHHKGQTVRDLKGQPVRLAEPLVDADEWELLQEILDRVQANWSGRRVEGVSPLSGVAVCITCDRPLHHDRYLVKRPYGDYPYRYYRCRDRHGKNLPAELVETLMEESFLARVGDYPVRERVWVQGDTNWADLKEAVAAYDELVQAAGRAKSATAKERLQRQLDALDERIAELESAPATEAHWEYRPTGGTYRDAWETADTDERREILRRSGIVLAVGVDGVEGRRSKHNPGALHFDFRVPEELTQRLGVA

SEQ ID NO: 2431 - protein, 502 aa, Artificial Sequence
  Description of Artificial Sequence: Synthetic polypeptide
MPTYDRSMRVIGRLRISRQTEESTSIERQRELIQNWADTHEHEIVGWAEDKDVSGSVDPFDTPGLGPWLKRDRLDDWDILVAWKLDRIARRAIAINRVFHLCQEHDKTLVCISDNIDLSTWVGRLIANVIAGVAEGELEAIRERTLASHRKLRELGRWPGGRPAYGYKAVERTDGPGWKLVHDEYSATIMREIVDRTLQGEAGNAIAQDLQARGVLPPAEYRRQMNGEKLRGGEWMGQVIRKMLKSRTLLGHVTHQQVTVINEKEGTPILKGEPLVSLEEWEELQAMLGGSSRPKNHNRTTAASPMLDVALCAECEKPLHLRTQRTQRKEKLHVHRYYYCPDKHGSAIRGEDVENAVENQFLEDFGDLPAMERVFREGENHEIEIKQAIQSIEALTPLLGAATSGTVLKSLTDQISAISNRVTYLESLPKAESGYILRPTGKTYREEWEERDEQGRRALLRRAGITATFRLTGKGRGGRNPAPGALEFHLRVPEDAHDRMAS

SEQ ID NO: 2432 - protein, 502 aa, Artificial Sequence
  Description of Artificial Sequence: Synthetic polypeptide
MRVLGRLRLSRSTEESTSIERQREIVTAWADSNGHTVVGWAEDVDVSGAIDPFDTPSLGVWLDERRGEWDILCAWKLDRLGRDAIRLNKLFLWCQEHGKTVTSCSEGIDLGTPVGRLIANVIAFLAEGEREAIRERVASSKQKLREIGRWGGGKPPFGYMGVRNPDGQGHILVVDPVAKPVVRRIVEDILEGKPLTRLCTELTEERYLTPAEYYATLKAGAPRQQAEEGEVTAKWRPTAVRNLLRSKALRGHAHHKGQTVRDDQGRAIQLAEPLVDADEWELLQETLDGIAADFSGRRVEGASPLSGVAVCMTCDKPLHHDRYLVKRPYGDYPYRYYRCRDRHGKNVPAETLEELVEDAFLQRVGDFPVRERVWVQGDTNWADLKEAVAAYDELVQAAGRAKSATARERLQRQLDILDERIAELESAPNTEAHWEYQRTGGTYRDAWENSDADERRELLRRSGIVVAVHIDGVEGRRSKHNPGALHFDIRVPHELTQRLIAP

SEQ ID NO: 2433 - protein, 502 aa, Artificial Sequence
  Description of Artificial Sequence: Synthetic polypeptide
MRVLGRLRLSRSTEESTSIERQREIVTAWAESNGHTLVGWAEDVDVSGAIDPFDTPSLGPWLDERRGEWDILCAWKLDRLGRDAIRLNKLFGWCQEHGKTVASCSEGIDLSTPVGRLIANVIAFLAEGEREAIRERVTSSKQKLREVGRWGGGKPPFGYMGIPNPDGQGHILVVDPVAKPVVRRIVDDILDGKPLTRLCTELTEERYLTPAEYYATLKAGAPRQKAEPDETPAKWRPTALRNLLRSKALRGYAHHKGQTVRDLKGQPVRLAEPLVDADEWELLQETLDRVQANWSGRRVEGVSPLSGVAVCITCDRPLHHDRYLVKRPYGDYPYRYYRCRDRHGKNLPAELVETLMEESFLARVGDYPVRERVWVQGDTNWADLKEAVAAYDELVQAAGRAKSATAKERLQRQLDALDERIAELESAPTTEAHWEYRPTGGTYRDAWETADTDERREILRRSGIVLAVGVDGVDGRRSKHNPGALHFDFRVPEELTQRLGVS

SEQ ID NO: 2434 - protein, 501 aa, Artificial Sequence
  Description of Artificial Sequence: Synthetic polypeptide
MVVIRLSRVTDATTSPERQLESCQQLCAQRGWDVVGVAEDLDVSGAVDPFDRKRRPNLARWLSFEEQPFDVIVAYRVDRLTRSIRHLQQLVHWAEDHKKLIVSATEAHFDTTTPFAAVVIALMGTVAQMELEAIKERNRSAAHFNIRAGKYRGSLPPWGYMPARVDGEWRLLVDPVQRERILEVYHRVVDNHEPLHLVAHDLNQRGILSPKDYFAKLQGREPKGREWSATALKRSLISEAMLGYATLNGKTVRDDDGAPLVRAEPILTREQLEALRAELVKTDRTKPAVSTPSLLLRVLFCAVCGEPAYKFTGGGRKNARYRCRSWGWAQRCGNGTVAMAEWDAFCEEQVLDLLGDAERLEKVWVAGSDSAVELAEVNAELVDLTSLIGSPAYRVGSPQREALDARIAALAARQEELEGLEARPSGWEWRETGQRFGDWWREQDTAAKNTWLRSMNVRLTFDVRGGLTRTIDFGDLQEYEQHLRLGSALDLVNAEKPPTGR

SEQ ID NO: 2435 - protein, 501 aa, Artificial Sequence
  Description of Artificial Sequence: Synthetic polypeptide
MSDMRVLGRLRISRATEESTSIERQREIVEQWASVNDHEIVGWAVDQDVSGSVDPFDAPALGPWLSDHRKHEWDILCAWKLDRLSRRAIPMNKLFGWMIDNDKTLVCVSENLDLGTWVGRMIANVIAGVAEGELEAIRERTTASHKKLRELGRWAGGPTYYGYVPKPRDGAGWELDIDPHAAGVLREIIEKTIAGQSTESIVVELNERGELAPSDYHRKRNGKPIRGTKWSTSWLRSQLKSKTLLGHMTHNGETVYDDAGLPVQKGPALVDRDTYKQLQDALESRGINRTRRRTGASPLLGVAVCDVCEGPLYYRQTKNAKGTAMLRQYICKHGRYGNTKANGGEPYNIIQADLLEATVEELFLSKMGDQPRVERVFIPGEGHQHELETAERAVEDLTSLLGTITQEGARKRLLAQLAAAHERLAHLEELPSSEPRWETRETGETYREAWEGATVEERRQILLKAGVTLKVQMKDRVPRVHPGVIVANWIEPHDIEKRLAS

SEQ ID NO: 2436 - protein, 500 aa, Artificial Sequence
  Description of Artificial Sequence: Synthetic polypeptide
MTQTLRALVGARVSVVQGPQKVSHIAQQESGTKWATERGHEIVGTFKDLDVSASVSPFERPDLGPWLSPERQDEWDILVFSKIDRMFRSTRDCVKFAEWAEERKKILVFAEDSMTLNYRDKSDSLEKMMSELFIYIGSFFAQLELNRFRSRAKDSHRVLRGTDRWASGVPPLGFKVIDHPSGKGKGLATDPEGKELLYDMAGKLLEGWSFIRISQYLNEKKIPTQLDKARMAKGKPAYDNPWSVNTVIESLTSLRTQGLKMTRSGKKFVTVLDEAGEPIRMAPPTFDAATWKQIQEAAALRQNNRRSRSYTANPMLGVGFCGQCGASLAQQFSRSKLKDGTVNEHRYYRCGRTPVNCQNVFLRADDGDDLLEQTFLEAYGDEPVTRRVFVPGEDHTEELEQVRATIERLRRESDAGLIVSAEDERIYLERMKSLIDRRTQLEAVPRRAAGWVTEETGQAYREAWETEDHRTLLSEAGIRFELKSSKPMNFALHVPQKEAG

SEQ ID NO: 2437 - protein, 500 aa, Artificial Sequence
  Description of Artificial Sequence: Synthetic polypeptide
MRALVVIRLSRVTDATTSPERQLESCQQLCAQRGWDVVGVAEDLDVSGAVDPFDRKRRPNLARWLAFEEQPFDVIVAYRVDRLTRSIRHLQQLVHWAEDHKKLVVSATEAHFDTTTPFAAVVIALMGTVAQMELEAIKERNRSAAHFNIRAGKYRGSLPPWGYLPTRVDGEWRLVPDPVQRERILEVYHRVVDNHEPLHLVAHDLNRRGVLSPKDYFAKLQGREPQGREWSATALKRSLISEAMLGYATLNGKTVRDDDGAPLVRAEPILTREQLEALRAELVKTDRTKPAVSTPSLLLRVLFCAVCGEPAYKFAGGGRKHPRYRCRSMGFPKHCGNGTVAMAEWDAFCEEQVLDLLGDSERLEKVWVAGSDSAVELAEVNAELVDLTSLIGSPAYRAGSPQREALDSRIAALAARQEELEGLEARPSGWEWRETGQRFGDWWREQDTAGKNTWLRAMNVRLTFDVRGGLTRTIDFGDLQEYEQHLRLGSVVERLHAGMS

SEQ ID NO: 2438 - protein, 500 aa, Artificial Sequence
  Description of Artificial Sequence: Synthetic polypeptide
MRALVVIRLSRVTDATTSPERQLESCQQLCAQRGWDVVGVAEDLDVSGAVDPFDRKRRPNLARWLAFEEQPFDVIVAYRVDRLTRSIRHLQQLVHWAEDHKKLVVSATEAHFDTTTPFAAVVIALMGTVAQMELEAIKERNRSAAHFNIRAGKYRGSLPPWGYLPTRVDGEWRLVPDPVQRERILEVYHRVVDNHEPLHLVAHDLNRRGVLSPKDYFAKLQGREPQGREWSATALKRSLISEAMLGYATLNGKTVRDDDGAPLVRSEPILTREQLEALRAELVKTDRTKPAVSTPSLLLRVLFCAVCGEPAYKFTGGGRKNARYRCRSWGWAQRCGNGTVAMAEWDAFCEEQVLDLLGDAERLEKVWVAGSDSAVELAEVNAELVDLTSLIGSPAYRAGSPQREALDARIAALAARQEELEGLEARPSGWEWRETGQRFGDWWRDQDTAAKNTWLRSMNVRLTFDVRGGLTRTIDFGDLQEYEQHLRLGSVVERLHTGMS

SEQ ID NO: 2439 - protein, 500 aa, Artificial Sequence
  Description of Artificial Sequence: Synthetic polypeptide
MRALVVIRLSRVTDATTSPERQLESCQRLCAQRGWDVVGVAEDLDVSGAVDPFDRKRRPNLARWLAFEEQPFDVIVAYRVDRLTRSIRHLQQLVHWAEDHKKLVVSATEAHFDTTTPFAAVVIALMGTVAQMELEAIKERNRSAAHFNIRAGKYRGSLPPWGYLPTRVDGEWRLVPDPVQRERILEVYHRVVDNHEPLHLVAHDLNRRGVLSPKDYFAKLQGREPQGREWSATALKRSLISEAMLGYATLNGKTVRDDDGAPLVRAEPILTREQLEALRAELVKTDRTKPAVSTPSLLLRVLFCAVCGEPAYKFTGGGRKNARYRCRSWGWAQRCGNGTVAMAEWDAFCEEQVLDLLGDAERLEKVWVAGSDSAVELAEVNAELVDLTSLIGSPAYRVGSPQREALDARIAALAARQEELEGLEARPSGWEWRETGQRFGDWWREQDTSGKNTWLRSMNVRLTFDVRGGLTRTIDFGDLQEYEQHLRLGSVVERLHTGMS

SEQ ID NO: 2440 - protein, 500 aa, Artificial Sequence [sequence omitted]

SEQ ID NO: 2441 - protein, 500 aa, Artificial Sequence
  Description of Artificial Sequence: Synthetic polypeptide
MRALVVIRLSRVTDATTSPERQLESCQQLCAQRGWDVVGVAEDLDVSGAVDPFDRKRRPNLARWLAFEEQPFDVIVAYRVDRLTRSIRHLQQLVHWAEDHKKLIVSATEAHFDTTSPFAAVVIALMGTVAQMELEAIKERNRSAAHFNIRAGKYRGSLPPWGYMPARVDGEWRLLVDPVQRERILEVYHRVVDNHEPLHLVAHDLNRRGVLSPKDYFAKLQGREPQGREWSATALKRSLISEAMLGYTTLNGKTVRDDDGAPLVRAEPILTREQLEALRAELVKTDRTKPAVSTPSLLLRVLFCAVCGEPAYKFTGGGRKNARYRCRSWGWAQRCGNGTVAMAEWDAFCEEQVLDLLGDAERLEKVWVAGSDSAVELAEVNAELVDLTSLIGSPAYRVGSPQREALDARIAALAARQEELEGLEARPSGWEWRETGQRFGDWWREQDTAAKNTWLRSMNVRLTFDVRGGLTRTIDFGDLQEYEQHLRLGSVVERLHTGMS

SEQ ID NO: 2442 - protein, 500 aa, Artificial Sequence
  Description of Artificial Sequence: Synthetic polypeptide
MRALVVIRLSRVTDATTSPERQLESCQQLCAQRGWDVVGVAEDLDVSGAVDPFDRKRRPNLARWLAFEEQPFDVIVAYRVDRLTRSIRHLQQLVHWAEDHKKLIVSATEAHFDTTTPFAAVVIALMGTVAQMELEAIKERNRSAAHFNIRAGKYRGSLPPWGYLPTRVDGEWRLVPDPVQRERILEVYHRVVDNHEPLHLVAHDLNRRGVLSPKDYFAKLQGRDPQGREWSATALKRSLISEAMLGYATLNGKTVRDDDGAPLVRAEPILTREQLEALRAELVKTDRTKPAVSTPSLLLRVLFCAVCGEPAYKFTGGGRRNARYRCRSWGWAQRCGNGTVAMAEWDAFCEEQVLDLLGDAERLEKVWVAGSDSAVELAEVNAELVDLTSLIGSPAYRVGSPQREALDARIAALAARQEELEGLEARPSGWEWRETGQRFGDWWREQDTSGKNTWLRSMNVRLTFDVRGGLTRTIDFGDLQEYEQHLRLGSVVERLHTGMS

SEQ ID NO: 2443 - protein, 500 aa, Artificial Sequence
  Description of Artificial Sequence: Synthetic polypeptide
MRALVVIRLSRVTDATTSPERQLESCQQLCAQRGWDVVGVAEDLDVSGAVDPFDRKRRPNLARWLSFEEQPFDVIVAYRVDRLTRSIRHLQQLVHWAEDHKKLIVSATEAHFDTTSPFAAVVIALMGTVAQMELEAIKERNRSAAHFNIRAGKYRGSLPPWGYMPARVDGEWRLVPDPVQRERILEVYHRVVDNHEPLHLVAHDLNRRGVLSPKDYFAKLQGREPQGREWSATALKRSLISEAMLGYATLNGKTVRDDDGAPLVRAEPILTREQLESLRAELVKTDRTKPAVSTPSLLLRVLFCAVCGEPAYKFTGGGRKNARYRCRSWGWAQRCGNGTVAMAEWDAFCEEQVLDLLGDSERLEKVWVAGSDSAVELAELNAELVDLTSLIGSPAYRAGSPQREALDARIAALAARQEELEGLEARPSGWEWRETGQRFGDWWRDQDTAGKNTWLRSMNVRLTFDVRGGLTRTIDFGDLQEYEQHLRLGSVVERLHTGMS

SEQ ID NO: 2444 - protein, 500 aa, Artificial Sequence
  Description of Artificial Sequence: Synthetic polypeptide
MRALVVIRLSRVTDATTSPERQLESCQQLCAQRGWDVVGVAEDLDVSGAVDPFDRKRRPNLARWLAFEEQPFDVIVAYRVDRLTRSIRHLQQLVHWAEDHKKLVVSATEAHFDTTTPFAAVVIALMGTVAQMELEAIKERNRSAAHFNIRAGKYRGSLPPWGYLPTRVDGEWRLVPDPVQRERILEVYHRVVDNHEPLHLVAHDLSRRGVLSPKDYFAKLQGREPRGREWSATALKRSLISEAMLGYATLNGKTVRDDDGAPLVRAEPILTREQLEALRAELVKTDRTKPAVATPSLLLRVLFCAVCGEPAYKFTGGGRKNARYRCRSWGWAQRCGNGTVAMAEWDAFCEEQVLDLLGDSERLEKVWVAGSDSAVELAEVNAELVDLTSLIGSPAYRVGSPQREALDARIAALAARQEELEGLEARPSGWEWRETGQRFGDWWREQDIAAKNTWLRSMNVRLTFDVRGGLTRTIDFGDLQEYEQHLRLGSVVERLHAGMS

SEQ ID NO: 2445 - protein, 500 aa, Artificial Sequence
  Description of Artificial Sequence: Synthetic polypeptide
MRALVVIRLSRVTDATTSPERQLESCQQLCAQRGWDVVGVAEDLDVSGAVDPFDRRRRPNLARWLAFEEQPFDVIVAYRVDRLTRSIRHLQQLVHWAEDHKKLVVSATEAHFDTTTPFAAVVIALMGTVAQMELEAIKERNRSAAHFNIRAGKYRGSLPPWGYLPTRVDGEWRLVPDPVQRERILEVYHRVVDNHEPLHLVAHDLNQRGVLSPKDYFAKLQGREPRGREWSATALKRSLISEAMLGYATLNGKTVRDDDGAPLVRAEPILTREQLEALRAELVKTDRTKPAVSTQSLLLRVLFCAVCGEPAYKFTGGGRKNARYRCRSWGWAQRCGNGTVAMAEWDAFCEEQVLDLLGGSERLEKVWVAGSDSAVELAEVNAELVDLTSLIGSPAYRVGSPQREALDARIAALAARQEELEGLEARPSGWEWRETGQRFGDWWREQGTAGKNTWLRSMNVRLTFDVRGGLTRTIDFGDLQEYEQHLRLGSVVERLHAGMS

SEQ ID NO: 2446 - protein, 500 aa, Artificial Sequence
  Description of Artificial Sequence: Synthetic polypeptide
MRALVVIRLSRVTDATTSPERQLESCQQLCAQRGWDVVGVAEDLDVSGAVDPFDRKRRPNLARWLAFEEQPFDVIVAYRVDRLTRSIRHLQQLVHWAEDHKKLIVSATEAHFDTTSPFAAVVIALMGTVAQMELEAIKERNRSAAHFNIRAGKYRGSLPPWGYMPARVDGEWRLLVDPVQRERILEVYHRVVDNHEPLHQIAHDLNQRGILSPKDYFAKLQGREPKGREWSATALKRSLISEAMLGYTTLNGKTVRDDDGAPLVRAEPILTREQLESLRAELVKTSRAKPAVSTPALLLRVLFCAVCGEPAYKFTGGGRKNARYRCRSWGWAQRCGNGTVAMAEWDAFCEEQVLDLLEDSERLEKVWVAGSDSAVELAEVNAELVDLTSLIGSPAYRVGSPQREALDARIAALAARQEELEGLEARPSGWEWRETGQRFGDWWREQDTAAKNTWLRSMNVRLTFDVRGGLTRTIDFGDLQEYEQHLRLGSVVERLHTGMS

SEQ ID NO: 2447 - protein, 500 aa, Artificial Sequence
  Description of Artificial Sequence: Synthetic polypeptide
MRALVVIRLSRVTDATTSPERQLESCQRLCAQRGWDVVGVAEDLDVSGAVDPFDRKRRPNLARWLAFEEQPFDVIVAYRVDRLTRSIRHLQQLVHWAEDHKKLVVSATEAHFDTTTPFAAVVIALMGTVAQMELEAIKERNRSAAHFNIRAGKYRGSLPPWGYLPTRVDGEWRLVPDPVQRERILEVYHRVVDNHEPLHLVAHDLNRRGVLSPKDYFAKLQGREPQGREWSATALKRSLISEAMLGYATLNGKTVRDDDGAPLVRSEPILTREQLEALRAELVKTDRTKPAVSTPSLLLRVLFCAVCGEPAYKFTGGGRKNARYRCRSWGWAQRCGNGTVAMAEWDAFCEEQVLDLLGDSERLEKVWVAGSDSAVELAEVNAELVDLTSLIGSPAYRVGSPQREALDARIAALAARQEELEGLEARPSGWEWRETGQRFGDWWREQDTAAKNTWLRSMNVRLTFDVRGGLTRTIDFGDLQEYEQHLRLGSVVERLHTGMS

SEQ ID NO: 2448 - protein, 500 aa, Artificial Sequence
  Description of Artificial Sequence: Synthetic polypeptide
MRALVVIRLSRVTDATTSPERQLESCQQLCAQRGWDVVGVAEDLDVSGAVDPFDRKRRPSLARWLAFEEQPFDVIVAYRVDRLTRSIRHLQQLVHWAEDHKKLVVSATEAHFDTTTPFAAVVIALMGTVAQMELEAIKERNRSAAHFNIRAGKYRGSLPPWGYLPTRVDGEWRLVPDPVQRERILEVYHRVVDNHEPLHLVAHDLNRRGVLSPKDYFAKLQGREPQGREWSATALKRSLISEAMLGYATLNGKTVRDDDGAPLVRAEPILTREQLEALRAELVKTDRAKPAVSTPSLLLRVLFCAVCGEPAYKFTGGGRKNARYRCRSWGWAQRCGNGTVAMAEWDAFCEEQVLDLLGDAERLEKVWVAGSDSAVELAEVNAELVDLTSLIGSPAYRVGSPQREALDARIAALAARQEELEGLEARPSGWEWREAGQRFGDWWREQDTAAKNTWLRSMNVRLTFDVRGGLTRTIDFGDLQEYEQHLRLGSVVEQLHAGMS

SEQ ID NO: 2449 - protein, 500 aa, Artificial Sequence
  Description of Artificial Sequence: Synthetic polypeptide
MRALVVIRLSRVTDATTSPERQLESCQQLCAQRGWDVVGVAEDLDVSGAVDPFDRKRRPNLARWLAFEEQPFDVIVAYRVDRLTRSIRHLQQLVHWAEDHKKLVVSATEAHFDTTSPFAAVVIALMGTVAQMELEAIKERNRSAAHFNIRAGKYRGSLPPWGYLPTRVDGEWRLVPDPVQRERILEVYHRVVDNHEPLHLVAHDLNRRGVLSPKDYFAKLQGREPQGREWSATALKRSLISEAMLGYATLNGKTVRDDDGAPLVRAEPILTREQLEALRAELVKTSRAKPAVATPSLLLRVLFCAVCGEPAYKFTGGGRKNARYRCRSWGWAQRCGNGTVAMAEWDAFCEEQVLDLLGGSERLEKVWVAGSDSAVELAEVNAELVDLTSLIGSPAYRVGSPQREALDARIAALAARQEELEGLEARPSGWEWRETGQRFGDWWREQGTAGKNTWLRSMNVRLTFDVRGGLTRTIDFGDLQEYEQHLRLGSVVERLHAGMS

SEQ ID NO: 2450 - protein, 500 aa, Artificial Sequence
  Description of Artificial Sequence: Synthetic polypeptide
MRALVVIRLSRVTDATTSPERQLESCQQLCAQRGWDVVGVAEDLDVSGAVDPFDRKRRPNLARWLAFEEQPFDVIVAYRVDRLTRSIRHLQQLVHWAEDHKKLVVSATEAHFDTTTPFAAVVIALMGTVAQMELEAIKERNRSAAHFNIRAGKYRGSLPPWGYLPTRVDGEWRLVPDPVQRERILEVYHRVVDNHEPLHLVAHDLNRRGVLSPKDYFAKLQGREPRGREWSATALKRSLISEAMLGYTTLNGKTVRDDDGAPLVRAEPILTREQLESLRAELVKTDRTKPAVSTPSLLLRVLFCAVCGEPAYKFAGGQRKNPRYRCRSMGFPKHCGNGTVAMAEWDAFCEEQVLDLLGDAERLEKVWVAGSDSAVELAEVNAELVDLTSLIGSPAYRVGSPQREALDARIAALAARQEELEGLEARPSGWEWRETGQRFGDWWREQDASGKNTWLRSMNVRLTFDVRGGLTRTIDFGDLQEYEQHLRLGSVVERLHTGMS

SEQ ID NO: 2451 - protein, 500 aa, Artificial Sequence
  Description of Artificial Sequence: Synthetic polypeptide
MRALVVIRLSRVTDATTSPERQLESCRQLCAQRGWDVVGVAEDLDVSGAVDPFDRKRRPNLARWLAFEEQPFDVIVAYRVDRLTRSIRHLQQLVHWAEDHKKLVVSATEAHFDTTTPFAAVVIALMGTVAQMELEAIKERNRSTAHFNIRAGKYRGSLPPWGYLPTRVDGEWRLVSDPVQRERILEVYHRVVDNHEPLHQIAHDLNQRGLPSPKDYFAKLQGREPKGREWSATALKRSLISEAMLGYATLNGKTVRDDDGAPLVRAEPILTREQLEALRAELVKTDRTKPAVATPSLLLRVLFCAVCGEPAYKFTGGGRKNARYRCRSWGWAQRCGNGTVAMAEWDAFCEEQVLDLLGGSERLEKVWVAGSDSAVELAEVNAELVDLTSLIGSPAYRVGSPQREALDARIAALAARQEELEGLEARPSGWEWRETGQRFGDWWREQGTAAKNTWLRSMNVRLTFDVRGGLTRTIDFGDLQEYEQHLRLGSVVERLHAGMS

SEQ ID NO: 2452 - protein, 500 aa, Artificial Sequence
  Description of Artificial Sequence: Synthetic polypeptide
MRALVVIRLSRVTDATTSPERQLESCQQLCAQRGWDVVGVAEDLDVSGAVDPFDRKRRPNLARWLAFEEQPFDVIVAYRVDRLTRSIRHLQQLVHWAEDHKKLVVSATEAHFDTTTPFAAVVIALMGTVAQMELEAIKERNRSAAHFNIRAGKYRGSLPPWGYLPTRVDGEWRLVPDPVQRERILEVYHRVVDNHEPLHLVAHDLNRRGVLSPKDYFAKLQGREPQGREWSATALKRSLISEAMLGYATLNGKTVRDDDGAPLVRAEPILTREQLEALRAELVKTDRTKPAVSTPSLLLRVLFCAVCGEPAYKFAGGGRKHPRYRCRSMGFPKHCGNGTVAMAEWDAFCEEQVLDLLGDSERLEKVWVAGSDSAVELAEVNAELVDLTSLIGSPAYRVGSPQREALDARIAALAARQEELEGLEARPSGWEWRETGQRFADWWRDQDTAGKNTWLRSMNVRLTFDVRGGLTRTIDFGDLQEYEQHLRLGSVVEQLHTGMS

SEQ ID NO: 2453 - protein, 500 aa, Artificial Sequence
  Description of Artificial Sequence: Synthetic polypeptide
MRALVVIRLSRVTDATTSPERQLESCQQLCAQRGWDVVGVAEDLDVSGAVDPFDRKRRPSLARWLAFEEQPFDVIVAYRVDRLTRSIRHLQQLVHWAEDHKKLIVSATEAHFDTTSPFAAVVIALMGTVAQMELEAIKERNRSAAHFNIRAGKYRGSLPPWGYMPARVDGEWRLLVDPVQRERILEVYHRVVDNHEPLHLVAHDLNQRGILSPKDYFAQLQGREPQGRAWSATALKRSLISEAMLGYTTLNGKTVRDDDGAPLVRAEPILTREQLEALRAELVKTDRTKPAVSTPSLLLRVLFCAVCGEPAYKFAGGGRKHPRYRCRSMGFPKHCGNGTVAMAEWDAFCEEQVLDLLGDAERLEKVWVAGSDAAVELAELNAELVDLTSLIGSPAYRAGSPQREALDARIEALAARQEELEARELRPSGWEWRETGQRFADWWAAQDVAGKNAWLRSMNVRLTFDVRGGLTRTIDFGDLQEYEQHLRLGSVVERLHTGMS

SEQ ID NO: 2454 - protein, 500 aa, Artificial Sequence
  Description of Artificial Sequence: Synthetic polypeptide
MRALVVIRLSRVTDATTSPERQLESCQQLCAQRGWDVVGVAEDLDVSGAVDPFDRKRRPNLARWLSFEEQPFDVIVAYRVDRLTRSIRHLQQLVHWAEDHKKLIVSATEAHFDTTTPFAAVVIALMGTVAQMELEAIKERNRSAAHFNIRAGKYRGSLPPWGYMPARVDGEWRLLVDPVQRERILEVYHRVVDNHEPLHLVAHDLNRRGVLSPKDYFAKLQGREPQGREWSATALKRSLISEAMLGYTTLNGKTVRDDDGAPLVRAEPILTREQLESLRAELVKTDRTKPAVSTPSLLLRVLFCAVCGEPAYKFTGGGRKNARYRCRSWGWAQRCGNGTVAMAEWDAFCEEQVLDLLGDAERLEKVWVAGSDAAVELTELNAELVDLTSLIGSPAYRAGSPQREALDARIAALAARQEELEGLEARPSGWEWRETGQRFGDWWRDQDTAGKNTWLRSMNVRLTFDVRGGLTRTIDFGDLQEYEQHLRLGSVVEQLHTGMS

SEQ ID NO: 2455 - protein, 500 aa, Artificial Sequence
  Description of Artificial Sequence: Synthetic polypeptide
MRALVVIRLSRVTDATTSPERQLESCQQLCAQRGWDVVGVAEDLDVSGAVDPFDRRRRPNLARWLAFEEQPFDVIVAYRVDRLTRSIRHLQQLVHWAEDHKKLVVSATEAHFDTTTPFAAVVIALMGTVAQMELEAIKERNRSAAHFNIRAGKYRGSLPPWGYLPTRVDGEWRLVPDPVQRERILEVYHRVVDNHEPLHLVAHDLNRRGVLSPKDYFAKLQGREPRGREWSATALKRSLISEAMLGYATLNGKTVRDDDGAPLVRAEPILTREQLEALRAELVKTDRAKPSVSTPSMLLRVLFCAVCGEPAYKFTGGGRKNARYRCRSWGWAQRCGNGTVAMAEWDSFCEEQVLDLLGDSERLEKVWVAGSDSAVELAEVNAELVDLTSLIGSPAYRAGSPQREALDARIAALAARQEELEGLEARPSGWEWRETGQRFGDWWREQDTAGKNTWLRSMNVRLTFDVRGGLTRTIDFGDLQEYEQHLRLGSVVERLHAGMS

SEQ ID NO: 2456 - protein, 500 aa, Artificial Sequence
  Description of Artificial Sequence: Synthetic polypeptide
MRALVVIRLSRVTDATTSPERQLESCQQLCAQRGWDVVGVAEDLDVSGAVDPFDRKRRPNLARWLAFEEQPFDVIVAYRVDRLTRSIRHLQQLVHWAEDHKKLVVSATEAHFDTTSPFAAVVIALMGTVAQMELEAIKERNRSAAHFNIRAGKYRGSLPPWGYLPTRVDGEWRLVPDPVQRERILEVYHRVVDNHEPLHLVAYDLNRRGVLSPKDYFAKLQGREPQGREWSATALKRSLISEAMLGYATLNGKTVRDDDGAPLVRAEPILTREQLEALRAELVKTDRTKPAVSTPSLLLRVLFCAVCGEPAYKFAGGGRKHPRYRCRSMGFPKHCGNGTVAMAEWDAFCEEQVLDLLGDSERLEKVWVAGSDSAVELAEVNAELVDLTSLIGSPAYRVGSPQREALDARIAALAARQEELEGLEARPSGWEWRETGQRFGDWWREQDTAAKNTWLRSMNVRLTFDVRGGLTRTIDFGDLQEYEQHLRLGSVVERLHTGMS

SEQ ID NO: 2457 - protein, 500 aa, Artificial Sequence
  Description of Artificial Sequence: Synthetic polypeptide
MTQTLRALVGARVSVVQGPQKVSHIAQQESGTKWATERGHEIVGTFKDLDVSASVSPFERPDLGPWLSPERQDEWDILVFSKIDRMFRSTRDCVKFAEWAEERKKILVFAEDSMTLNYRDKSDSLEKMMSELFIYIGSFFAQLELNRFRSRAKDSHRVLRGTDRWASGVPPLGFKVIDHPSGKGKGLATDPEGKELLYDMAGKLLEGWSFIRISQCLNEKKIPTQLDKARMAKGKPAYENPWSVNTVIESLTSLRTQGLKMTRSGKKFVTVLDEAGEPIRMAPPTFDAATWKQIQEAAALRQNNRRSRSYTANPMLGVGFCGQCGASLAQQFSRSKLKDGTVNEHRYYRCGRTPVNCQNVFLRADDGDELLEQTFLEAYGDEPVTRRVFVPGEDHTEELEQVRATIERLRRESDAGLIVSAEDERIYLERMKSLIDRRTQLEAVPRRAAGWVTEETGQTYREAWETEDHRTLLSEAGIRFELKSSKPMNFALHVPQKEAG

SEQ ID NO: 2458 - protein, 500 aa, Artificial Sequence
  Description of Artificial Sequence: Synthetic polypeptide
MRALVVIRLSRVTDATTSPERQLESCQQLCAQRGWDVVGVAEDLDVSGAVDPFDRKRRPNLARWLAFEEQPFDVIVAYRVDRLTRSIRHLQQLVHWAEDHKKLVVSATEAHFDTTTPFAAVVIALMGTVAQMELEAIKERNRSAAHFNIRAGKYRGSLPPWGYLPTRVDGEWRLVPDPVQRERILEVYHRVVDSHEPLHLVAHDLNRRGVLSPKDYFAKLQGREPQGREWSATALKRSLISEAMLGYATLNGKTVRDDDGAPLVRSEPILTREQLEALRAELVKTDRTKPAVSTPSLLLRVLFCAVCGEPAYKFAGGQRKNPRYRCRSMGFPKHCGNGTVAMAEWDAFCEEQVLDLLGDAERLEKVWVAGSDSAVELAEVNAELVDLTSLIGSPAYRAGSPQREALDARIAALAARQEELEGLEARPSGWEWRETGQRFGDWWREQDTSGKNTWLRSMNVRLTFDVRGGLTRTIDFGDLQEYEQHLRLGSVVERLHDGMS

SEQ ID NO: 2459 - protein, 500 aa, Artificial Sequence
  Description of Artificial Sequence: Synthetic polypeptide
MRALVVIRLSRVTDATTSPERQLESCQQLCAQRGWDVVGVAEDLDVSGAVDPFDRKRRPNLARWLAFEEQPFDVIVAYRVDRLTRSIRHLQQLVHWAEDHKKLVVSATEAHFDTTTPFAAVVIALMGTVAQMELEAIKERNRSAAHFNIRAGKYRGSLPPWGYLPTRVDGEWRLVPDPVQRERILEVYHRVVDNHEPLHLVAHDLNRRGVLSPKDYFAKLQGREPQGREWSATALKRSLISEAMLGYATLNGKTVRDDDGAPLVRAEPILTREQLEALRAELVKTSRAKPAVSTPSLLLRVLFCAVCGLPAYKFAGGQRKNPRYRCRSMGFPKHCGNGTVAMAEWDAFCEEQVLDLLGDAERLEKVWVAGSDSAVELAEVNAELVDLTSLIGSPAYRVGAPQREALDARIAALAARQEELEGLEARPSGWEWRETGQRFGDWWAQQDTAAKNTWLRAMNVRLTFDVRGGLTRTIDFGDLQEYEQHLRLGSVVEQLHTGMS

SEQ ID NO: 2460 - protein, 500 aa, Artificial Sequence
  Description of Artificial Sequence: Synthetic polypeptide
MRALVVIRLSRVTDATTSPERQLESCQQLCAQRGWDVVGVAEDLDVSGAVDPFDRKRRPNLARWLAFEEQPFDVIVAYRVDRLTRSIRHLQQLVHWAEDHKKLVVSATEAHFDTTTPFAAVVIALMGTVAQMELEAIKERNRSAAHFNIRAGKYRGSLPPWGYLPTRVDGEWRLVPDPVQRERILEVYHRVVDNHEPLHLVAHDLNRRGVLSPKDYFAKLQGREPRGREWSATALKRSLISEAMLGCATLNGKTVRDDDGAPLVRAEPILTREQLEALRAELVKADRTKPAVSTPSLLLRVLFCAVCGEPAYKFTGGGRKNARYRCRSWGWAQRCGNGTVAMAEWDAFCEEQVLDLLGDAERLEKVWVAGSDAAVELTELNAELVDLTSLIGSPAYRAGSPQREALDARIAALAARQEELEGLEARPSGWEWRETGQRFGDWWRDQDTAGKNTWLRSMNVRLTFDVRGGLTRTIDFGDLQEYEQHLRLGSVVEQLHTGMS

SEQ ID NO: 2461 - protein, 500 aa, Artificial Sequence
  Description of Artificial Sequence: Synthetic polypeptide
MRALVVIRLSRVTDATTSPERQLESCQQLCAQRSWDVVGVAEDLDVSGAVDPFDRKRRPNLARWLAFEEQPFDVIVAYRVDRLTRSIRHLQQLVHWAEDHKKLVVSATEAHFDTTTPFAAVVIALMGTVAQMELEAIKERNRSAAHFNIRAGKYRGSLPPWGYLPTRVDGEWRLVPDPVQRERILEVYHRVVDNHEPLHLVAHDLNRRGVLSPKDYFAKLQGREPRGREWSATALKRSLISEAMLGYATLNGKTVRDDDGAPLVRAEPILTREQLEALRAELVKTDRTKPAVSTPSLLLRVLFCAVCGEPAYKFTGGGRKNARYRCRSWGWAQRCGNGTVAMAEWDAFCEEQVLDLLGDAERLEKVWVAGSDSAVELAEVNAELVDLTSLIGSPAYRAGSPQREALDARIAALAARQEELEGLEARPSGWEWRETGQRFGDWWREQDTTAKNTWLRSMNVRLTFDVRGGLTRTIDFGDLQEYEQHLRLGNVVEQLHAGMS

SEQ ID NO: 2462 - protein, 500 aa, Artificial Sequence
  Description of Artificial Sequence: Synthetic polypeptide
MRALVVIRLSRVTDATTSPERQLESCQQLCAQRGWDVVGVAEDLDVSGAVDPFDRKRRPNLARWLAFEEQPFDVIVAYRVDRLTRSIRHLQQLVHWAEDHKKLVVSATEAHFDTTTPFAAVVIALMGTVAQMELEAIKERNRSAAHFNIRAGKYRGSLPPWGYLPTRVDGEWRLVPDPVQRERILEVYHRVVDNHEPLHLVAHDLNRRGVLSPKDYFAKLQGREPQGREWSATALKRSLISEAMLGYATLNGKTVRDDDGAPLVRAEPILTREQLEALRAELVKTDRTKPAVSTPSLLLRVLFCAVCGEPAYKFAGGGRKHPRYRCRSMGFPKHCGNGTVAMAEWDAFCEEQVLDLLGDAERLEKVWVGGSDSAVELAEVNAELVDLTSLIGSPAYRVGSPQREALDARIAALAARQEELEGLEARPSGWEWRETGQRFGDWWREQDIAAKNTWLRSMNVRLTFDVRGGLTRTIDFGDLQEYEQHLRLGSVVERLHAGMS

SEQ ID NO: 2463 - protein, 500 aa, Artificial Sequence
  Description of Artificial Sequence: Synthetic polypeptide
MRALVVIRLSRVTDATTSPERQLESCRQLCAQRGWEVVGVAEDLDVSGAVDPFDRKRRPNLARWLAFEEQPFDVIVAYRVDRLTRSIRHLQQLVHWAEDHKKLVVSATEAHFDTTTPFAAVVIALMGTVAQMELEAIKERNRSAAHFNIRAGKYRGSLPPWGYLPTRVDGEWRLVPDPVQRERILEVYHRVVDNHEPLHLVAHDLNRRGVLSPKDYFAKLQGREPRGREWSATALKRSLISEAMLGYATLNGKTVRDDDGAPLVRAEPILTREQLEALRAELVKTDRTKPAVSTPSLLLRVLFCAVCGEPAYKFAGGGRKHPRYRCRSMGFPKHCGNGTVAMAEWDAFCEEQVLDLLGDAERLEKVWVAGSDSAVELAEVNAELVDLTSLIGSPAYRVGSPQREALDARIAALAARQEELEGLEARPSGWEWRETGQRFGDWWREQDIAGKNTWLRSMNVRLTFDVRGGLTRTIDFGDLQEYEQHLRLGSVVERLHTGMS

SEQ ID NO: 2464 - protein, 500 aa, Artificial Sequence
  Description of Artificial Sequence: Synthetic polypeptide
MRALVVIRLSRVTDATTSPERQLESCQQLCAQRGWEVVGVAEDLDVSGAVDPFDRKRRPNLARWLAFEEQPFDVIVAYRVDRLTRSIRHLQQLVHWAEDHKKLVVSATEAHFDTTTPFAAVVIALMGTVAQMELEAIKERNRSAAHFNIRAGKYRGSLPPWGYMPTRVDGEWRLVPDPVQRERILEVYHRVVDNHEPLHQIAHDLNQRGLPSPKDYFAKLQGREPQGREWSATALKRSLISEAMLGYATLNGKTVRDDDGAPLVRAEPILTREQLEALRAELVKTDRTKPAVSTPSLLLRVLFCAVCGEPAYKFTGGGRKSARYRCRSWGWAQRCGNGTVAMAEWDAFCEEQVLDLLGDAERLEKVWVAGSDAAVELTELNAELVDLTSLIGSPAYRAGSPQREALDARIAALAARQEELEGLEARPSGWEWRETGQRFGDWWAAQDVAGKNAWLRSMNVRLTFDVRGGLTRTIDFGDLQEYEQHLRLGSVVERLHAGMS

SEQ ID NO: 2465 - protein, 500 aa, Artificial Sequence
  Description of Artificial Sequence: Synthetic polypeptide
MRALVVIRLSRVTDATTSPERQLESCQQLCAQRGWDVVGVAEDLDVSGAVDPFDRKRRPNLARWLSFEEQPFDVIVAYRVDRLTRSIRHLQQLVHWAEDHKKLIVSATEAHFDTTSPFAAVVIALMGTVAQMELEAIKERNRSAAHFNIRAGKYRGSLPPWGYLPTRVDGEWRLVPDPVQRERILEVYHRVVDNHEPLHQIAHDLNQRGILSPKDYFAKLQGREPKGREWSATALKRSLISEAMLGYTTLNGKTVRDDDGAPLVRAEPILTREQLEALRAELVKTDRTKPAVSTPSLLLRVLFCAVCGEPAYKFTGGGRKNARYRCRSWGWAQRCGNGTVAMAEWDAFCEEQVLDLLGDSERLEKVWVAGSDSAVELAEVNAELVDLTSLIGSPAYRAGSPQREALDARIAALAARQEELEGLEARPSGWEWRETGQRFGDWWRDQDTAGKNTWLRSMNVRLTFDVRGGLTRTIDFGDLQEYEQHLRLGSVVEQLHTGMS

SEQ ID NO: 2466 - protein, 500 aa, Artificial Sequence
  Description of Artificial Sequence: Synthetic polypeptide
MRALVVIRLSRVTDATTSPERQLESCRQLCAQRGWDVVGVAEDLDVSGAVDPFDRKRRPNLARWLAFEEQPFDVIVAYRVDRLTRSIRHLQQLVHWAEDHKKLVVSATEAHFDTTTPFAAVVIALMGTVAQMELEAIKERNRSAAHFNIRAGKYRGSLPPWGYLPTRVDGEWRLVPDPVQRERILEVYHRVVDNHEPLHLVAHDLNRRGVLSPKDYFAKLQGREPQGREWSATALKRSLISEAMLGYATLNGKTVRDDDGAPLVRAEPILTREQLEALRAELVKTDRAKPSVSTPSMLLRVLFCAVCGEPAYKFAGGQRKNPRYRCRSMGFPKHCGNGTVAMAEWDAFCEEQVLDLLGDAERLEKVWVAGSDSAVELAEVNAELVDLTSLIGSPAYRVGSPQREALDARIAALAARQEELEGLEARPSGWEWRETGQRFGDWWREQGTAAKNTWLRSMNVRLTFDVRGGLTRTIDFGDLQEYEQHLRLGSVVEQLHTGMS

SEQ ID NO: 2467 - protein, 500 aa, Artificial Sequence
  Description of Artificial Sequence: Synthetic polypeptide
MRALVVIRLSRVTDATTSPERQLESCQQLCAQRGWDVVGVAEDLDVSGAVDPFDRKRRPNLARWLAFEEQPFDVIVAYRVDRLTRSIRHLQQLVHWAEDHKKLVVSATEAHFDTTTPFAAVVIALMGTVAQMELEAIKERNRSAAHFNIRAGKYRGSLPPWGYLPTRVDGEWRLVPDPVQRERILEVYHRVVDNHEPLHLVAHDLNRRGVLSPKDYFAKLQGREPQGREWSATALKRSLISEAMLGYATLNGKTVRDDDGAPLVRAEPILTREQLEALRAELVKTDRTKPAVSTPSLLLRVLFCAVCGEPAYKFAGGGRKHPRYRCRSMGFPKHCGNGTVAMAEWDAFCEEQVLDLLGDSERLEKVWVAGSDSAVELAEVNAELVDLTSLIGSPTYRVGSPQREALDARIAALAARQEELEGLEARPSGWEWRETGQRFGDWWEQQDTAAKNTWLRSMNVRLTFDVRGGLTRTIDFGDLQEYEQHLRLGSVVERLHAGMS

SEQ ID NO: 2468 - protein, 500 aa, Artificial Sequence
  Description of Artificial Sequence: Synthetic polypeptide
MRALVVIRLSRVTDATTSPERQLESCQQLCAQRGWDVVGVAEDLDVSGAVDPFDRKRRPNLARWLAFEEQPFDVIVAYRVDRLTRSIRHLQQLVHWAEDHKKLVVSATEAHFDTTTPFAAVVIALMGTVAQMELEAIKERNRSAAHFNIRAGKYRGSLPPWGYLPTRVDGEWRLVPDPVQRERILEVYHRVVDNHEPLHLVAHDLNRRGVLSPKDYFAKLQGREPQGREWSATALKRSLISEAMLGYATLNGKTVRDDDGAPLVRAEPILTREQLEALRAELVKTDRTKPAVSTPSLLLRVLFCAVCGEPAYKFTGGGRKNARYRCRSWGWAQRCGNGTVAMAEWDAFCEEQVLDLLGDAERLEKVWVAGSDSAVELAEVNAELVDLTSLIGSPAYRVGSPQREALDARIAALAARQEELEGLEARPSGWEWRETGQRFGDWWREQDTSGKNTWLRSMNVRLTFDVRGGLTRTIDFGDLQEYEQHLRLGSVVERLHAGMS

SEQ ID NO: 2469 - protein, 500 aa, Artificial Sequence
  Description of Artificial Sequence: Synthetic polypeptide
MRALVVIRLSRVTDATTSPERQLESCQQLCAQRGWDVVGVAEDLDVSGAVDPFDRKRRPNLARWLAFEEQPFDVIVAYRVDRLTRSIRHLQQLVHWAEDHKKLVVSATEAHFDTTTPFAAVVIALMGTVAQMELEAIKERNRSAAHFNIRAGKYRGSLPPWGYLPTRVDGEWRLLVDPVQRERILEVYHRVVDNHEPLHLVAHDLNQRGILSPKDYFAQLQGREPQGRAWSATALKRSLISEAMLGYATLNGKTVRDDDGAPLVRAEPILTREQLEALRAELVKTDRTKPAVSTPSLLLRVLFCAVCGEPAYKFAGGGRKHPRYRCRSMGFPKHCGNGTVAMAEWDAFCEEQVLDLLGDAERLEKVWVAGSDAAVELAELNAELVDLTSLIGSPAYRAGSPQREALDARIEALAARQEELEGLEARPSGWEWRETGQRFGDWWREQDTAAKNTWLRSMNVRLTFDVRGGLTRTIDFGDLQEYEQHLRLGSVVERLHTGMS

SEQ ID NO: 2470 - protein, 500 aa, Artificial Sequence
  Description of Artificial Sequence: Synthetic polypeptide
MTQTLRALVGARVSVVQGPQKVSHIAQQESGTRWATERGHEIVGTFKDLDVSASVSPFERPDLGPWLSPERQDEWDILVFSKIDRMFRSTRDCVKFAEWAEERKKILVFAEDSMTLNYRDKSDSLEKMMSELFIYIGSFFAQLELNRFRSRAKDSHRVLRGTDRWASGVPPLGFKVIDHPSGKGKGLATDPEGKELLYDMAGKLLEGWSFIRISQYLNEKKIPTQLDKARMAKGKPAYENPWSVNTVIESLTSLRTQGLKMTRSGKKFVTVLDEAGEPIRMAPPTFDAATWKQIQEAAALRQNNRRSRSYTANPMLGVGFCGQCGASLAQQFSRSKLKDGTVNEHRYYRCGRTPVNCQNVFLRADDGDELLEQTFLEAYGDEPVTRRVFVPGEDHTEELEQVRATIERLRRESDAGLIVSAEDERIYLERMKSLIDRRTQLEAVPRRAAGWVTEETGQTYREAWETEDHRTLLSEAGIRFELKSSKPMNFALHVPQKEAG

SEQ ID NO: 2471 - protein, 500 aa, Artificial Sequence
  Description of Artificial Sequence: Synthetic polypeptide
MRALVVIRLSRVTDATTSPERQLESCQQLCAQRGWDVVGVAEDLDVSGAVDPFDRKRRPNLARWLAFEEQPFDVIVAYRVDRLTRSIRHLQQLVHWAEDHKKLVVSATEAHFDTTTPFAAVVIALMGTVAQMELEAIKERNRSAAHFNIRAGKYRGSLPPWGYLPTRVDGEWRLVPDPVQRERILEVYHRVVDNHEPLHLVAHDLNRRGVLSPKDYFAKLQGREPQGREWSATALKRSLISEAMLGYATLNGKTVRDDDGAPLVRAEPILTREQLEALRAELVKTDRTKPAVSTPSLLLRVLFCAVCGEPAYKFAGGGRKHPRYRCRSMGFPKHCGNGTVAMAEWDAFCEEQVLDLLGDSERLEKVWVAGSDSAVELAEVNAELVDLTSLIGSPAYRAGSPQREALDSRIAALAARQEELEGLEARPSGWEWRETGQRFGDWWREQDTAAKNTWLRSMNVRLTFDVRGGLTRTIDFGDLQEYEQHLRLGSVVEQLHAGMS

SEQ ID NO: 2472 - protein, 500 aa, Artificial Sequence
  Description of Artificial Sequence: Synthetic polypeptide
MLGRLRLSRSTEESTSIERQREIVTAWADSNGHTVVGWAEDVDVSGAIDPFDTPSLGVWLDERRGEWDILCAWKLDRLGRDAIRLNKLFLWCQEHGKTVTSCSEGIDLGTPVGRLIANVIAFLAEGEREAIRERVASSKQKLREIGRWGGGKPPFGYMGVRNPDGQGHILVVDPVAKPVVRRIVEDILEGKPLTRLCTELTEERYLTPAEYYATLKAGAPRQQAEEGEVTAKWRPTAVRNLLRSKALRGHAHHKGQTVRDDQGRAIQLAEPLVDADEWELLQETLDGIAADFSGRRVEGASPLSGVAVCMTCDKPLHHDRYLVKRPYGDYPYRYYRCRDRHGKNVPAETLEELVEDAFLQRVGDFPVRERVWVQGDTNWADLKEAVAAYDELVQAAGRAKSATARERLQRQLDILDERIAELESAPNTEAHWEYQRTGGTYRDAWENSDADERRELLRRSGIVVAVHIDGVEGRRSKHNPGALHFDIRVPHELTQRLIAP

SEQ ID NO: 2473 - protein, 500 aa, Artificial Sequence
  Description of Artificial Sequence: Synthetic polypeptide
MRALVVIRLSRVTDATTSPERQLEACQQLCAQRGWDVVGVAEDLDVSGAVDPFDRKRRPNLARWLAFEEQPFDVIVAYRVDRLTRSIRHLQQLVHWAEDHKKLVVSATEAHFDTTTPFAAVVIALMGTVAQMELEAIKERNRSAAHFNIRAGKYRGSLPPWGYLPTRVDGEWRLVPDPVQRERILEVYHRVVDNHEPLHLVAHDLNRRGVLSPKDYFAKLQGREPQGREWSATALKRSLISEAMLGYATLNGKTVRDDDGAPLVRAEPILTREQLEALRAELVKTDRTKPAVSTPSLLLRVLFCAVCGEPAYKFAGGQRKNPRYRCRSMGFPKHCGNGTVAMAEWDAFCEEQVLDLLGDAERLEKVWVAGSDSAVELAEVNAELVDLTSLIGSPAYRVGSPQREALDARIAALAARQEELEGLEARPSGWEWRETGQRFADWWAQQDTAGKNTWLRAMNVRLTFDVRGGLTRTIDFGDLQEYEQHLRLGSVVERLHTGMS

SEQ ID NO: 2474 - protein, 500 aa, Artificial Sequence
  Description of Artificial Sequence: Synthetic polypeptide
MRALVVIRLSRVTDATTSPERQLESCQQLCAQRGWEVVGVAEDLDVSGAVDPFDRKRRPNLARWLAFEEQPFDVIVAYRVDRLTRSIRHLQQLVHWAEDHKKLIVSATEAHFDTTSPFAAVVIALMGTVAQMELEAIKERNRSAAHFNIRAGKYRGSLPPWGYMPARVEGEWRLLVDPVQRERILEVYHRVVDNHEPLHQIAHDLNQRGILSPKDYFAQLQGREPQGREWSATALKRSLISEAMLGYATLNGKTVRDDDGAPLVRSEPILTREQLEALRAELVKTDRTKPAVSTPSLLLRVLFCAVCGEPAYKFTGGGRKNARYRCRSWGWAQRCGNGTVAMAEWDAFCEEQVLDLLGDAERLEKVWVAGSDSAVELAEVNAELVDLTSLIGSPAYRVGSPQREALDARIAALAARQEELEGLEARPSGWEWRETGQRFADWWREQDTAAKNTWLRSMNVRLTFDVRGGLTRTIDFGDLQEYEQHLRLGSVVERLHAGMS

SEQ ID NO: 2475 - protein, 500 aa, Artificial Sequence
  Description of Artificial Sequence: Synthetic polypeptide
MLGRLRLSRSTEESTSIERQREIVTAWADSNGHTVVGWAEDVDVSGAIDPFDTPSLGVWLDERRGEWDILCAWKLDRLGRDAIRLNKLFLWCQEHGKTVTSCSEGIDLGTPVGRLIANVIAFLAEGEREAIRERVASSKQKLREIGRWGGGKPPFGYMGVRNPDGQGHILVVDPVAKPVVRRIVEDILEGKPLTRLCTELTEERYLTPAEYYATLKAGAPRQQAEEGEVTAKWRPTAVRNLLRSKALRGHAHHKGQTVRDDQGRAIQLAEPLVDADEWELLQETLDGIAADFSGRRVEGASPLSGVAVCMTCDKPLHHDRYLVKRPYGDYPYRYYRCRDRHGKNVPAETLEELVEDAFLQRVGDFPVRERVWVQGDTNWADLKEAVAAYDELVQAAGRAKSATARERLQRQLDILDERIAELESAPNTEAHWEYQPTGGTYRDAWENSDADERRELLRRSGIVVAVHIDGVEGRRSKHNPGALHFDIRVPHELTQRLIAP

SEQ ID NO: 2476 - protein, 500 aa, Artificial Sequence
  Description of Artificial Sequence: Synthetic polypeptide
MRALVVIRLSRVTDATTSPERQLESCQQLCAQRGWDVVGVAEDLDVSGAVDPFDRKRRPNLARWLAFEEQPFDVIVAYRVDRLTRSIRHLQQLVHWAEDHKKLIVSATEAHFDTTSPFAAVVIALMGTVAQMELEAIKERNRSAAHFNIRAGKYRGSLPPWGYMPARVDGEWRLVPDPVQRERILEVYHRVVDNHEPLHLVAHDLNRRGVLSPKDYFAQLQGREPQGRAWSATALKRSLISEAMLGYTTLNGKTVRDDDGAPLVRAEPILTREQLEALRAELVKTDRTKPAVSTPSLLLRVLFCAVCGEPAYKFTGGGRKNARYRCRSWGWAQRCGNGTVAMAEWDAFCEEQVLDLLGDSERLEKVWVAGSDSAVELAEVNAELVDLTSLIGSPAYRVGSPQREALDARIAALAARQEELEGLEARPSGWEWRETGQRFGDWWREQDTSAKNTWLRSMNVRLTFDVRGGLTRTIDFGDLQEYEQHLRLGSVVERLHTGMS

SEQ ID NO: 2477 - protein, 500 aa, Artificial Sequence
  Description of Artificial Sequence: Synthetic polypeptide
MRALVVIRLSRVTDATTSPERQLESCQQLCAQRGWEVVGVAEDLDVSGAVDPFDRKRRPNLARWLAFEEQPFDVIVAYRVDRLTRSIRHLQQLVHWAEDHKKLVVSATEAHFDTTTPFAAVVIALMGTVAQMELEAIKERNRSAAHFNIRAGKYRGSLPPWGYLPTRVDGEWRLVPDPVQRERILEVYHRVVDNHEPLHLVAHDLNQRGVLSPKDYFAKLQGREPQGREWSATALKRSLISEAMLGYATLNGKTVRDDDGAPLVRAEPILTREQLEALRAELVKTGRTKPAVSTPSLLLRVLFCAVCGEPAYKFAGGGRKHPRYRCRSMGFPKHCGNGTVAMAEWDAFCEEQVLDLLGDAERLEKVWVAGSDSAVELAELNAELVDLTSLIGSPAYRAGSPQREALDARIEALAARQEELEARELRPSGWEWRETGQRFADWWAAQDVAGKNAWLRSMNVRLTFDVRGGLTRTIDFGDLQEYEQHLRLGSVVEQLHTGMS

SEQ ID NO: 2478 - protein, 500 aa, Artificial Sequence
  Description of Artificial Sequence: Synthetic polypeptide
MRALVVIRLSRVTDATTSPERQLESCQQLCAQRGWDVVGVAEDLDVSGAVDPFDRKRRPNLARWLAFEEQPFDVIVAYRVDRLTRSIRHLQQLVHWAEDHKKLVVSATEAHFDTTTPFAAVVIALMGTVAQMELEAIKERNRSAAHFNIRAGKYRGSLPPWGYLPTRVDGEWRLVPDPVQRARILEVYHRVVDNHEPLHLVAHDLNRRGVLSPKDYFAKLQGREPQGREWSATALKRSLISEAMLGYATLNGKTVRDDDGAPLVRAEPILTREQLEALRAELVKTDRTKPAVSTPSLLLRVLFCAVCGEPAYKFAGGGRKHPRYRCRSMGFPKHCGNGTVAMAEWDAFCEEQVLDLLGDAERLEKVWVAGSDSAVELAEVNAELVDLTSLIGSPAYRVGSPQREALDARIAALAARQEELEGLEARPSGWEWRETGQRFGDWWREQDTAAKNTWLRSMNVRLTFDVRGGLTRTIDFGDLQEYEQHLRLGSVVERLHTGMS

SEQ ID NO: 2479 - protein, 500 aa, Artificial Sequence
  Description of Artificial Sequence: Synthetic polypeptide
MRALVVIRLSRVTDATTSPERQLESCRQLCAQRGWEVVGVAEDLDVSGAVDPFDRKRRPNLARWLAFEEQPFDVIVAYRVDRLTRSIRHLQQLVHWAEDHKKLVVSATEAHFDTTTPFAAVVIALMGTVAQMELEAIKERNRSAAHFNIRAGKYRGSLPPWGYLPTRVDGEWRLVPDPVQRERILEVYHRVVDNHEPLHLVAHDLNRRGVLSPKDYFAKLQGREPQGREWSATALKRSLISEAMLGYATLNGKTVRDDDGAPLVRSEPILTREQLEALRAELVKTDRTKPAVSTPSLLLRVLFCAVCGEPAYKFAGGGRKHPRYRCRSMGFPKHCGNGTVAMAEWDAFCEEQVLDLLGDSERLEKVWIAGSDSAVELAEVNAELVDLTSLIGSPAYRAGSPQREALDARIAALAARQEELEGLEARPSGWEWRETGQRFGDWWREQDTSGKNTWLRSMNVRLTFDVRGGLTRTIDFGDLQEYEQHLRLGSVVERLHTGMS

SEQ ID NO: 2480 - protein, 500 aa, Artificial Sequence
  Description of Artificial Sequence: Synthetic polypeptide
MRALVVIRLSRVTDATTSPERQLESCQQLCAQRGWDVVGVAEDLDVSGAVDPFDRKRRPNLARWLAFEEQPFDVIVAYRVDRLTRSIRHLQQLVHWAEDHKKLVVSATEAHFDTTTPFAAVVIALMGTVAQMELEAIKERNRSAAHFNIRAGKYRGSLPPWGYLPTRVDGEWRLVPDPVQRERILEVYHRVVDNHEPLHLVAHDLNRRGVLSPKDYFAKLQGREPRGREWSATALKRSLISEAMLGYTTLNGKTVRDDDGAPLVRAEPILTREQLESLRAELVKTDRTKPAVSTPSLLLRVLFCAVCGEPAYKFTGGGRKNARYRCRSWGWAQRCGNGTVAMAEWDAFCEEQVLDLLGDAERLEKVWVAGSDAAVELTELNAELVDLTSLIGSPAYRAGSPQREALDARIAALAARQEELEGLEARPSGWEWRETGQRFGDWWRDQDTAGKNTWLRSMNVRLTFDVRGGLTRTIDFGDLQEYEQHLRLGSVVEQLHTGMS

SEQ ID NO: 2481 - protein, 500 aa, Artificial Sequence
  Description of Artificial Sequence: Synthetic polypeptide
MRALVVIRLSRVTDATTSPERQLESCQQLCAQRGWDVIGVAEDLDVSGAVDPFDRKRRPNLARWLAFEEQPFDVIVAYRVDRLTRSIRHLQQLVHWAEDHKKLVVSATEAHFDTTTPFAAVVIALMGTVAQMELEAIKERNRSAAHFNIRAGKYRGSLPPWGYLPTRVDGEWRLVPDPVQRERILEVYHRVVDNHEPLHLVAHDLNRRGVLSPKDYFAKLQGREPQGREWSATALKRSLISEAMLGYATLNGKTVRDDDGAPLVRSEPILTREQLEALRAELVKTDRTKPAVSTPSLLLRVLFCAVCGEPAYKFAGGGRKHPRYRCRSMGFPKHCGNGTVAMAEWDAFCEEQVLDLLGDSERLEKVWAAGSDSAVELAEVNAELVDLTSLIGSPAYRVGSPQREALDARIAALAARQEELEGLEARPSGWEWRETGQRFGDWWREQDAAAKNTWLRSMNVRLTFDVRGGLTRTIDFGDLQEYEQHLRLGSVVEQLHAGMS

SEQ ID NO: 2482 - protein, 500 aa, Artificial Sequence
  Description of Artificial Sequence: Synthetic polypeptide
MRALVVIRLSRVTDATTSPERQLESCQQLCAQRGWDVVGVAEDLDVSGAVDPFDRKRRPNLARWLAFEEQPFDVIVAYRVDRLTRSIRHLQQLVHWAEDHKKLVVSATEAHFDTTTPFAAVVIALMGTVAQMELEAIKERNRSAAHFNIRAGKYRGSLPPWGYLPTRVDGEWRLVPDPVQRERILEVYHRVVDNHEPLHLVAHDLNRRGVLSPKDYFAKLQGREPRGREWSATALKRSLISEAMLGYATLNGKTVRDDDGAPLVRAEPILTREQLEALRAELVKTDRTKPAVSTPSLLLRVLFCAVCGEPAYKFTGGGRKNARYRCRSWGWAQRCGNGTVAMAEWDAFCEEQVLDLLGDAERLEKVWVAGSDSAVELAEVNAELVDLTSLIGSPAYRVGSPQREALDARIAALAARQEELEGLEARPSGWEWRETGQRFGDWWAQQDTAAKNTWLRSMNVRLTFDVRGGLTRTIDFGDLQEYEQHLRLGSVVERLHTGMS

SEQ ID NO: 2483 - protein, 500 aa, Artificial Sequence
  Description of Artificial Sequence: Synthetic polypeptide
MRALVVIRLSRVTDATTSPERQLESCQQLCAQRGWEVVGVAEDLDVSGAVDPFDRKRRPNLARWLAFEEQPFDVIVAYRVDRLTRSIRHLQQLVHWAEDHKKLVVSATEAHFDTTTPFAAVVIALMGTVAQMELEAIKERNRSAAHFNIRAGKYRGSLPPWGYLPTRVDGEWRLVPDPVQRERILEVYHRVVDNHEPLHLVAHDLNRRGVLSPKDYFAKLQGREPQGREWSATALKRSLISEAMLGYATLNGKTVRDDDGAPLVRAEPILTREQLEALRAELVKTDRTKPAVSTPSLLLRVLFCAVCGEPAYKFAGGQRKNPRYRCRSMGFPKHCGNGTVAMAEWDAFCEEQVLDLLGDSERLEKVWVAGSDSAVELAEVNAELVDLTSLIGSPAYRVGSPQREALDARIAALAARQEELEGLEARPSGWEWRETGQRFGDWWREQDTAAKNTWLRSMNVRLTFDVRGGLTRTIDFGDLQEYEQHLRLGSVVERLHAGMS

SEQ ID NO: 2484 - protein, 500 aa, Artificial Sequence
  Description of Artificial Sequence: Synthetic polypeptide
MRALVVIRLSRVTDATTSPERQLESCQQLCAQRGWDVVGVAEDLDVSGAVDPFDRKRRPNLARWLAFEEQPFDVIVAYRVDRLTRSIRHLQQLVHWAEDHKKLIVSATEAHFDTTSPFAAVVIALMGTVAQMELEAIKERNRSAAHFNIRAGKYRGSLPPWGYLPMRVDGEWRLVPDPVQRERILEVYHRVVDNHEPLHLVAHDLNRRGVLSPKDYFAKLQGREPQGREWSATALKRSLISEAMLGYTTLNGKTVRDDDGAPLVRAEPILTREQLESLRAELVKTDRTKPAVSTPSLLLRVLFCAVCGEPAYKFTGGGRKNARYRCRSWGWAQRCGNGTVAMAEWDAFCEEQVLDLLGDAERLEKVWVAGSDAAVELTELNAELVDLTSLIGSPAYRAGSPQREALDARIAALAARQEELEGLEARPSGWEWRETGQRFGDWWRDQDTAGKNTWLRSMNVRLTFDVRGGLTRTIDFGDLQEYEQHLRLGSVVEQLHTGMS

SEQ ID NO: 2485 - protein, 500 aa, Artificial Sequence
  Description of Artificial Sequence: Synthetic polypeptide
MRALVVIRLSRVTDATTSPERQLESCQQLCAQRGWEVVGVAEDLDVSGAVDPFDRKRRPNLARWLAFEEQPFDVIVAYRVDRLTRSIRHLQQLVHWAEDHKKLVVSATEAHFDTTTPFAAVVIALMGTVAQMELEAIKERNRSAAHFNIRAGKYRGSLPPWGYLPTRVDGEWRLVPDPVQRERILEVYHRVVDNHEPLHLVAHDLNRRGVLSPKDYFAKLQGREPQGREWSATALKRSLISEAMLGYATLNGKTVRDDDGAPLVRAEPILTREQLEALRAELVKTDRTKPAVSTPSLLLRVLFCAVCGEPAYKFAGGQRKNPRYRCRSMGFPKHCGNGTVAMAEWDAFCEEQVLDLLGDSERLEKVWVAGSDSAVELAEVNAELVDLTSLIGSPAYRVGSPQREALDARIAALAARQEELEGLEARPSGWEWRETGQRFGDWWREQDTAAKNTWLRSMNVRLTFDVRGGLTRTIDFGDLQEYEQHLRLGSVVERLHTGMS

SEQ ID NO: 2486 - protein, 500 aa, Artificial Sequence
  Description of Artificial Sequence: Synthetic polypeptide
MRALVVIRLSRVTDATTSPERQLESCQQLCAQRGWAVVGVAEDLDVSGAVDPFDRKRRPNLARWLAFEEQPFDVIVAYRVDRLTRSIRHLQQLVHWAEDHKKLVVSATEAHFDTTTPFAAVVIALMGTVAQMELEAIKERNRSAAHFNIRAGKYRGSLPPWGYLPTRIDGEWRLVPDPVQRERILEVYHRVVDNHEPLHLVAHDLNRRGVLSPKDYFAKLQGREPQGREWSATALKRSLISEAMLGYATLNGKTVRDDDGAPLVRSEPILTREQLEALRAELVKTDRTKPAVSTPSLLLRVLFCAVCGEPAYKFTGGGRKNARYRCRSWGWAQRCGNGTVAMAEWDAFCEEQVLDLLGDAERLEKVWVAGSDSAVELAEVNAELVDLTSLIGSPAYRVGSPQREALDARIAALAARQEELEGLEARPSGWEWRETGQRFGDWWRDQDTAGKNTWLRSMNVRLTFDVRGGLTRTIDFGDLQEYEQHLRLGSVVEQLHAGMS

SEQ ID NO: 2487 - protein, 500 aa, Artificial Sequence
  Description of Artificial Sequence: Synthetic polypeptide
MTQTLRALVGARVSVVQGPQKVSHIAQQESGTKWATERGHEIVGTFKDLDVSASVSPFERPDLGPWLSPERQDEWDILVFSKIDRMFRSTRDCVKFAEWAEERKKILVFAEDSMTLNYRDKSDSLEKMMSELFIYIGSFFAQLELNRFRSRAKDSHRVLRGTDRWASGVPPLGFKVIDHPSGKGKGLATDPEGKELLYDMAGKLLEGWSFIRISQYLNEKRIPTQLDKARMAKGKPAYDNPWSVNTVIESLTSLRTQGLKMTRSGKKFVTVLDEAGEPIRMAPPTFDAATWKQIQEAAALRQNNRRSRSYTANPMLGVGFCGQCGASLAQQFSRSKLKDGTVNEHRYYRCGRTPVNCQNVFLRADDGDDLLEQTFLEAYGDEPVTRRVFVPGEDHTEELEQVRATIERLRRESDAGLIVSAEDERIYLERMKSLIDRRTQLEAVPRRAAGWVTEETGQTYREAWETEDHRTLLSEAGIRFELKSSKPMNFALHVPQKEAG

SEQ ID NO: 2488 - protein, 500 aa, Artificial Sequence
  Description of Artificial Sequence: Synthetic polypeptide
MRALVVIRLSRVTDATTSPERQLESCQRLCAQRGWDVVGVAEDLDVSGAVDPFDRKRRPNLARWLAFEEQPFDVIVAYRVDRLTRSIRHLQQLVHWAEDHKKLVVSATEAHFDTTTPFAAVVIALMGTVAQMELEAIKERNRSAAHFNIRAGKYRGSLPPWGYLPTRVDGEWRLVPDPVQRERILEVYHRVVDNHEPLHLVAHDLNRRGVLSPKDYFAKLQGREPQGREWSATALKRSLISEAMLGYATLNGKTVRDDDGAPLVRAEPILTREQLEALRAELVKTDRTKPAVSTPSLLLRVLFCAVCGEPAYKFAGGGRKHPRYRCRSMGFPKHCGNGTVAMAEWDAFCEEQVLDLLGDAERLEKVWVAGSDSAVELAEVNAELVDLTSLIGSPAYRVGSPQREALDARIAALAARQEELEGLEARPSGWEWRETGQRFGDWWREQGTAAKNTWLRSMNVRLTFDVRGGLTRTIDFGDLQEYEQHLRLGSVVERLHAGMS

SEQ ID NO: 2489 - protein, 500 aa, Artificial Sequence
  Description of Artificial Sequence: Synthetic polypeptide
MTQTLRALVGARVSVVQGPQKVSHIAQQESGTKWATERGHEIVGTFKDLDVSASVSPFERPDLGPWLSPERQDEWDILVFSKIDRMFRSTRDCVKFAEWAEERKKILVFAEDSMTLNYRDKSDSLEKMMSELFIYIGSFFAQLELNRFRSRAKDSHRVLRGTDRWASGVPPLGFKVIDHPSGKGKGLTTDPEGKELLYDMAGKLLEGWSFIRISQYLNEKKIPTQLDKARMAKGKPAYENPWSVNTVIESLTSLRTQGLKMTRSGKKFVTVLDEAGEPIRMAPPTFDAATWKQIQEAAALRQNNRRSRSYTANPMLGVGFCGQCGASLAQQFSRSKLKDGTVNEHRYYRCGRTPVNCQNVFLRADDGDDLLEQTFLEAYGDEPVTRRVFVPGEDHTEELEQVRATIERLRRESDAGLIVSAEDERIYLERMKSLIDRRTQLEAVPRRAAGWVTEETGQSYREAWETEDHRTLLSEAGIRFELKSSKPMNFALHVPQKEAG

SEQ ID NO: 2490 - protein, 500 aa, Artificial Sequence
  Description of Artificial Sequence: Synthetic polypeptide
MRALVVIRLSRVTDATTSPERQLESCRQLCAQRGWDVVGVAEDLDVSGAVDPFDRKRRPNLARWLAFEEQPFDVIVAYRVDRLTRSIRHLQQLVHWAEDHKKLVVSATEAHFDTTTPFAAVVIALMGTVAQMELEAIKERNRSAAHFNIRAGKYRGSLPPWGYLPTRVDGEWRLVPDPVQRERILEVYHRVVDNHEPLHLVAHDLNRRGVLSPKDYFAKLQGREPQGREWSATALKRSLISEAMLGYATLNGKTVRDDDGAPLVRSEPILTREQLEALRAELVKTDRTKPAVATPSLLLRVLFCAVCGEPAYKFAGGGRKHPRYRCRSMGFPKHCGNGTVAMAEWDAFCEEQVLDLLGDAERLEKVWVAGSDSAVELAEVNAELVDLTSLIGSPAYRVGSPQREALDARIAALAARQEELEGLEARPSGWEWRETGQRFGDWWREQDTAAKNTWLRSMNVRLTFDVRGGLTRTIDFGDLQEYEQHLRLGSVVERLHTGMS

SEQ ID NO: 2491 - protein, 500 aa, Artificial Sequence
  Description of Artificial Sequence: Synthetic polypeptide
MRALVVIRLSRVTDATTSPERQLESCQQLCAQRGWEVVGVAEDLDVSGAVDPFDRKRRPNLARWLAFEEQPFDVIVAYRVDRLTRSIRHLQQLVHWAEDHKKLVVSATEAHFDTTTPFAAVVIALMGTVAQMELEAIKERNRSAAHFNIRAGKYRGSLPPWGYLPTRVDGEWRLVPDPAQRERILEVYHRVVDNHEPLHLVAHDLNRRGILSPKDYFAKLQGREPQGREWSATALKRSLISEAMLGYATLNGKTVRDDDGAPLVRAEPILTREQLEALRAELVKTDRTKPAVSTPSLLLRVLFCAVCGEPAYKFTGGGRKNARYRCRSWGWAQRCGNGTVAMAEWDAFCEEQVLDLLGGAERLEKVWVAGSDSAVELAEVNAELVDLTSLIGSPAYRVGSPQREALDARIAALAARQEELEGLEARPSGWEWRETGQRFGDWWREQDIAAKNTWLRSMNVRLTFDVRGGLTRTIDFGDLQEYEQHLRLGSVVEQLHTGMS

SEQ ID NO: 2492 - protein, 500 aa, Artificial Sequence
  Description of Artificial Sequence: Synthetic polypeptide
MRALVVIRLSRVTDATTSPERQLESCQQLCAQRGWDVVGVAEDLDVSGAVDPFDRKRRPNLARWLAFEEQPFDVIVAYRVDRLTRSIRHLQQLVHWAEDHKKLVVSATEAHFDTTTPFAAVVIALMGTVAQMELEAIKERNRSAAHFNIRAGKYRGSLPPWGYLPTRVDGEWRLVPDPVQRERILEVYHRVVDNHEPLHLVAHDLNRRGVLSPKDYFAKLQGREPQGREWSATALKRSLISEAMLGYATLNGKTVRDDDGAPLVRAEPILTREQLEALRAELVKTDRTKPAVATPSLLLRVLFCAVCGEPAYKFTGGGRKNARYRCRSWGWAQRCGNGTVAMAEWDAFCEEQVLDLLGDAERLEKVWVAGSDSAVELAEVNAELVDLTSLIGSPAYRVGSPQREALDARIAALAARQEELEGLEARPSGWEWRETGQRFGDWWREQDTAAKNTWLRSMNVRLTFDVRGGLTRTIDFGDLQEYEQHLRLGSVVEQLHAGMS

SEQ ID NO: 2493 - protein, 500 aa, Artificial Sequence
  Description of Artificial Sequence: Synthetic polypeptide
MRALVVIRLSRVTDATTSPERQLESCQQLCTQRGWDVVGVAEDLDVSGAVDPFDRKRRPNLARWLAFEEQPFDVIVAYRVDRLTRSIRHLQQLVHWAEDHKKLIVSATEAHFDTTSPFAAVVIALMGTVAQMELESIKERNRSAAHFNIRAGKYRGSLPPWGYLPTRVDGEWRLVPDPVQRERILEVYHRVVDNHEPLHLVAHDLNRRGVLSPKDYFAKLQGREPQGREWSATALKRSLISEAMLGYATLNGKTVRDDDGALLVRAEPILTREQLEALRAELVKTDRTKPAVATPSLLLRVLFCAVCGEPAYKFTGGQRKNPRYRCRSMGFPKHCGNGTVAMAEWDAFCEEQVLDLLGDAERLEKVWVAGSDSAVELAEVNAELVDLTSLIGSPAYRVGSPQREALDARIAALAARQEELEGLEARPSGWEWRETGQRFGDWWREQDTAAKNTWLRSMNVRLTFDVRGGLTRTIDFGDLQEYEQHLRLGGVVEQLHTGMS

SEQ ID NO: 2494 - protein, 500 aa, Artificial Sequence
  Description of Artificial Sequence: Synthetic polypeptide
MTQTLRALVGARVSVVQGPQKVSHIAQQESGTKWATERGHEIVGTFKDLDVSASVSPFERPDLGPWLSPERQDEWDILVFSKIDRMFRSTRDCVKFAEWAEERKKILVFAEDSMTLNYRDKSDSLEKMMSELFIYIGSFFAQLELNRFRSRAKDSHRVLRGTDRWASGVPPLGFKVIDHPSGKGKGLATDPEGKELLYDMAGKLLEGWSFIRISQYLNEKKIPTQLDKARMAKGKPAYDNPWSVNTVIESLTSLRTQGLKMTRSGKKFVTVLDEAGEPIRMAPPTFDAATWKQIQEAAALRQNNRRSRSYTANPMLGVGFCGQCGASLAQQFSRSKLKDGTVNEHRYYRCGRTPVNCQNVFLRADDGDDLLEQTFLEAYGDEPVTRRVFVPGEDHTEELEQVRATIERLRRESDAGLIVSAEDERIYLERMKSLIDRRTQLEAVPRRAAGWVTEETGQTYREAWETEDHRTLLSEAGIRFELKSSKPMNFALHVPQKEAG

SEQ ID NO: 2495 - protein, 500 aa, Artificial Sequence
  Description of Artificial Sequence: Synthetic polypeptide
MRALVVIRLSRVTDATTSPERQLESCQQLCAQRGWDVVGVAEDLDVSGAVDPFDRKRRPNLARWLAFEEQPFDVIVAYRVDRLTRSIRHLQQLVHWAEDHKKLVVSATEAHFDTTTPFAAVVIALMGTVAQMELEAIKERNRSAAHFNIRAGKYRGSLPPWGYLPTRVDGEWRLVPDPVQRERILEVYHRVVDNHEPLHLVAHDLNQRGILSPKDYFAQLQGREPQGREWSATALKRSLISEAMLGYTTLNGKTVRDDDGAPLVRSEPILTREQLEALRAELVKTDRTKPAVSTPSLLLRVLFCAVCGEPAYKFAGGGRKNARYRCRSWGWAQRCGNGTVAMAEWDAFCEEQVLDLLGDAERLEKVWVAGSDSAVELAEVNAELVDLTSLIGSPAYRAGSPQREALDARIAALAARQEELEGLEARPSGWEWRETGQRFGDWWREQDIAAKNTWLRSMNVRLTFDVRGGLTRTIDFGDLQEYEQHLRLGSVVEQLHAGMS

SEQ ID NO: 2496 - protein, 500 aa, Artificial Sequence
  Description of Artificial Sequence: Synthetic polypeptide
MRALVVIRLSRVTDATTSPERQLESCQQLCAQRGWDIVGVAEDLDVSGAVDPFDRKRRPNLARWLAFEEQPFDVIVAYRVDRLTRSIRHLQQLVHWAEDHKKLIVSATEAHFDTTSPFAAVVIALMGTVAQMELEAIKERNRSAAHFNIRAGKYRGSLPPWGYMPARVDGEWRLLVDPVQRERILEVYHRVVDNHEPLHLVAHDLNRRGILSPKDYFAQLQGREPQGRAWSATALKRSLISEAMLGYTTLNGKTVRDDDGAPLVRAEPILTREQLEALRAELVKTDRTKPAVSTPSLLLRVLFCAVCGEPAYKFTGGGRKNARYRCRSWGWAQRCGNGTVAMAEWDAFCEEQVLDLLGDAERLEKVWVAGSDSAVELAEVNAELVDLTSLIGSPAYRVGSPQREALDARIAALAARQEELEGLEARPSGWEWRETGQRFGDWWREQDIAGKNTWLRSMNVRLTFDVRGGLTRTIDFGDLQEYEQHLRLGSVVERLHTGMS

SEQ ID NO: 2497 - protein, 500 aa, Artificial Sequence
  Description of Artificial Sequence: Synthetic polypeptide
MRALVVIRLSRVTDATTSPERQLESCHQLCAQRGWDVVGVAEDLDVSGAVDPFDRKRRPNLARWLAFEEQPFDVIVAYRVDRLTRSIRHLQQLVHWAEDHKKLVVSATEAHFDTTTPFAAVVIALMGTVAQMELEAIKERNRSAAHFNIRAGKYRGSLPPWGYLPTRVDGEWRLVPDPVQRERILEVYHRVVDNHEPLHLVAHDLNRRGVLSPKDYFAKLQGREPQGREWSATALKRSLISEAMLGYATLNGKTVRDDDGAPLVRAEPILTREQLEALRAELVKTDRTKPAVSTPSLLLRVLFCAVCGEPAYKFTGGGRKNARYRCRSWGWAQRCGNGTVAMAEWDAFCEEQVLDLLGDAERLEKVWVAGSDSAVELAEVNAELVDLTSLIGSPAYRVGSPQREALDARIAALAARQEELEGLEARPSGWEWRETGQRFGDWWREQDTSGKNTWLRSMNVRLTFDVRGGLTRTIDFGDLQEYEQHLRLGSVVEQLHAGMS

SEQ ID NO: 2498 - protein, 500 aa, Artificial Sequence
  Description of Artificial Sequence: Synthetic polypeptide
MRALVVIRLSRVTDATTSPERQLESCQQLCAQRGWDVVGVAEDLDVSGAVDPFDRKRRPNLARWLAFEEQPFDVIVAHRVDRLTRSIRHLQQLVHWAEDHKKLVVSATEAHFDTTTPFAAVVIALMGTVAQMELEAIKERNRSAAHFNIRAGKYRGSLPPWGYLPTRVDGEWRLVPDPVQRERILEVYHRVVDNHEPLHLVAHDLNRRGVLSPKDYFAKLQGREPQGREWSATALKRSLISEAMLGYATLNGKTVRDDDGAPLVRAEPILTREQLEALRAELVNTDRTKPAVSTPSLLLRVLFCAVCGEPAYKFTGGGRKNPRYRCRSWGWAQRCGNGTVAMAEWDAFCEEQVLDLLGDAERLEKVWVAGSDSAVELAEVNAELVDLTSLIGSPAYRVGSPQREALDARIAALAARQEELEGLEARPSGWEWRETGQRFGDWWREQDTSAKNTWLRSMNVRLTFDVRGGLTRTIDFGDLQEYEQHLRLGSVVERLHTGMS

SEQ ID NO: 2499 - protein, 500 aa, Artificial Sequence
  Description of Artificial Sequence: Synthetic polypeptide
MTQTLRALVGARVSVVQGPQKVSHIAQQESGTKWATERGHEIVGTFKDLDVSASVSPFERPDLGPWLSPERQDEWDILVFSKIDRMFRSTRDCVKFAEWAEERKKILVFAEDSMTLNYRDKSDSLEKMMSELFIYIGSFFAQLELNRFRSRAKDSHRVLRGTDRWASGVPPLGFKVIDHPSGKGKGLATDPEGKELLYDMAGKLLEGWSFIRISQYLNEKKIPTQLDKARMAKGKPAYENPWSVNTVIESLTSLRTQGLKMTRSGKKFVTVLDEAGEPIRMAPPTFDAATWKQIQEAAALRQNNRRSRSYTANPMLGVGFCGQCGASLAQQFSRSKLKDGTVNEHRYYRCGRTPVNCQNVFLRADDGDDLLEQTFLEAYGDEPVTRRVFVPGEDHTEELEQVRATIERLRRESDAGLIVSAEDERIYLERMKSLIDRRTQLEAVPRRAAGWVTEETGQTYREAWETEDHRTLLSEAGIRFELKSSKPMNFALHVPQKEAG

SEQ ID NO: 2500 - protein, 500 aa, Artificial Sequence
  Description of Artificial Sequence: Synthetic polypeptide
MRALVVIRLSRVTDATTSPERQLESCRQLCAQRGWDVVGVAEDLDVSGAVDPFDRKRRPNLARWLAFEEQPFDVIVAYRVDRLTRSIRHLQQLVHWAEDHKKLVVSATEAHFDTTTPFAAVVIALMGTVAQMELEAIKERNRSAAHFNIRAGKYRGSLPPWGYLPTRVDGEWRLVPDPVQRERILEVYHRVVDNHEPLHLVAHDLNRRGVLSPKDYFAQLQGREPQGRAWSATALKRSLISEAMLGYATLNGKTVRDDDGAPLVRSEPILTREQLESLRAELVKTDRTKPAVSTPSLLLRVLFCAVCGEPAYKFAGGGRKHPRYRCRSMGFPKHCGNGTVAMAEWDAFCEEQVLDLLGDSERLEKVWVAGSDSAVELAEVNAELLDLTSLIGSPAYRAGSPQREALDARIAALAARQEELEGLEARPSGWEWRETGQRFGDWWRDQDTAGKNTWLRSMNVRLTFDVRGGLTRTIDFGDLQEYEQHLRLGSVVERLHTGMS

SEQ ID NO: 2501 - protein, 500 aa, Artificial Sequence
  Description of Artificial Sequence: Synthetic polypeptide
MRALVVIRLSRVTDATTSPERQLESCQQLCAQRGWDVVGVAEDLDVSGAVDPFDRKRRPNLARWLAFEEQPFDVIVAYRVDRLTRSIRHLQQLVHWAEDHKKLVVSATESHFDTTSPFAAVVIALMGTVAQMELEAIKERNRSAAHFNIRAGKYRGSLPPWGYMPARVDGEWRLLVDPVQRERILEVYHRVVDNHEPLHQIAHDLNQRGILSPKDYFAKLQGREPKGREWSATALKRSLISEAMLGYATLNGKTVRDDDGAPLVRAEPILTREQLEALRAELVKTARTKPAVSTPSLLLRVLFCAVCGEPAYKFAGGQRKNPRYRCRSMGFPKHCGNGTVAMAEWDAFCEEQVLDLLGDAERLEKVWVAGSDSAVELAEVNAELVDLTSLIGSPAYRVGSPQREALEARIAALAARQEELEGLEARPSGWEWRETGQRFGDWWRDQDTAGKNTWLRSMSVRLTFDVRGGLTRTIDFGDLQEYEQHLRLGSVVEQLHTGMS

SEQ ID NO: 2502 - protein, 499 aa, Artificial Sequence
  Description of Artificial Sequence: Synthetic polypeptide
MRALVVIRLSRVTDATTSPERQLESCQQLCAQRGWEVVGVAEDLDVSGAVDPFDRKRRPNLARWLAFEEQPFDVIVAYRVDRLTRSIRHLQQLVHWAEDHKKLVVSATEAHFDTTSPFAAVVIALMGTVAQMELEAIKERNRSAAHFNIRAGKYRGSLPPWGYLPTRVDGEWRLVPDPVQRERILEVYHRVVDNHEPLHLVAHDLNRRGVLSPKDYFAKLQGREPQGREWSATALKRSLISEAMLGYATLNGKTVRDDDGAPLVRAEPILTREQLEALRAELVKTDRAKPAVSTPSLLLRVLFCAVCGEPAYKFDAGRKIPRYRCRSFGFAQRCGNGTVPIAEWDAFCEEQVLDLLGDSERLEKVWVAGSDSAVELAEVNAELVDLTSLIGSPAYRVGSPQREALDARIAALAARQEELEGLEARPSGWEWRETGQRFGDWWREQDTSAKNTWLRSMNVRLTFDVRGGLTRTIDFGDLQEYEQHLRLGSVVEQLHAGMS

SEQ ID NO: 2503 - protein, 499 aa, Artificial Sequence
  Description of Artificial Sequence: Synthetic polypeptide
MRALVVIRLSRVTDATTSPERQLESCQQLCAQRGWEVVGVAEDLDVSGAVDPFDRKRRPNLARWLAFEEQPFDVIVAYRVDRLTRSIRHLQQLVHWAEDHKKLVVSATEAHFDTTTPFAAVVIALMGTVAQMELEAIKERNRSAAHFNIRAGKYRGSLPPWGYLPTRVDGEWRLVPDPVQRERILEVYHRVVDNHEPLHLVAHDLNRRGVLSPKDYFAKLQGREPQGREWSATALKRSLISEAMLGYATLNGKTVRDDDGAPLVRAEPILTREQLEALRAELVKTDRAKPAVSTPSLLLRVLFCAVCGEPAYKFDAGRKIPRYRCRSFGFAQRCGNGTVPIAEWDAFCEEQVLDLLGDSERLEKVWVAGSDSAVELAEVNAELVDLTSLIGSPAYRVGSPQREALDARIAALAARQEELEGLEARPSGWEWRETGQRFGDWWREQDTSAKNTWLRSMNVRLTFDVRGGLTRTIDFGDLQEYEQHLRLGSVVEQLHAGMS

SEQ ID NO: 2504 - protein, 499 aa, Artificial Sequence
  Description of Artificial Sequence: Synthetic polypeptide
MRALVVIRLSRVTDATTSPERQLESCQQLCAQRGWDVVGVAEDLDVSGAVDPFDRKRRPNLARWLAFEEQPFDVIVAYRVDRLTRSIRHLQQLVHWAEDHKKLVVSATEAHFDTTTPFAAVVIALMGTVAQMELEAIKERNRSAAHFNIRAGKYRGSLPPWGYLPTRVDGEWRLVPDPVQRERILEVYHRVVDNHEPLHLVAHDLNRRGVLSPKDYFAKLQGREPQGREWSATALKRSLISEAMLGYATLNGKTVRDDDGAPLVRSEPILTREQLEALRAELVKTDRTKPAVSTPSLLLRVLFCAVCGEPAYKFDAGRKIPRYRCRSFGFAQRCGNGTVPISEWDAFCEEQVLDLLGDAERLEKVWVAGSDSAVELAEVNAELVDLTSLIGSPAYRVGSPQREALDARIAALAARQEELEGLEARPSGWEWRETGQRFGDWWREQDTAAKNTWLRSMNVRLTFDVRGGLTRTIDFGDLQEYEQHLRLGNVVERLHTGMS

SEQ ID NO: 2505 - protein, 499 aa, Artificial Sequence
  Description of Artificial Sequence: Synthetic polypeptide
MRALVVIRLSRVTDATTSPERQLESCQQLCAQRGWDVVGVAEDLDVSGAVDPFDRKRRPNLARWLAFEEQPFDVIVAYRVDRLTRSIRHLQQLVHWAEDHKKLVVSATEAHFDTTTPFAAVVIALMGTVAQMELEAIKERNRSAAHFNIRAGKYRGSLPPWGYLPTRVDGEWRLVPDPVQRERILEVYHRVVDNHEPLHLVAHDLNRRGVLSPKDYFAKLQGREPQGREWSATALKRSLISEAMLGYATLNGKTVRDDDGAPLVRAEPILTREQLEALRAELVKTDRAKPAVSTPSLLLRVLFCAVCGEPAYKFDAGRKIPRYRCRSFGFAQRCGNGTVPIAEWDAFCEEQVLDLLGDSERLEKVWVAGSDSAVELAEVNAELVDLTSLIGSPAYRAGSPQREALDARIAALAARQEELEGLEARPSGWEWRETGQRFGDWWREQDTSAKNTWLRSMNVRLTFDVRGGLTRTIDFGDLQEYEQHLRLGSVVEQLHAGMS

SEQ ID NO: 2506 - protein, 499 aa, Artificial Sequence
  Description of Artificial Sequence: Synthetic polypeptide
MPKYDGRMRVLGRVRLSRFQEESTSVERQREIVENWAKQHDHEIIGWAEDIDVSRSVDPFDTPGLGPWFTDKTKIDQWDIVATWKLDRLATGSIYLNKMMGWCAENEKVIVSVTENFDLSTWVGRMIANVIAGVAEGELEAIKERTQASRKKLVSVGRWTGGRPTYGYRAVEIPSGGWALEPDPESSVTLAWMIDEVLAGTSANAIAKSLNERGVLTPADFVRYRNGKPTKGAKWSVTALLSLLRSRTLLGEIMHNGRTVLGDDGEPVLAGPPLIDVEKFNRVQAVLEARSLKQYMDRVDASPLLGVLVCAGCGDNMYHQRQMDKRRGVMYRYYKCLKRCGQQFHADVAEEMVENQFLNDLGDSEALTRVYIPAENHQIELEEAVRLMDGLTPLLGAVTSDHARKRLTEQISALDSKIARLEMLPESPARTELQPTGLTYRELWESLDTDGRRELMVKAGIRAAVKVEGRTVGGRGGRTTGAITFHFQIPEDLHERLAS

SEQ ID NO: 2507 - protein, 499 aa, Artificial Sequence
  Description of Artificial Sequence: Synthetic polypeptide
MRALVVIRLSRVTDATTSPERQLESCQQLCAQRGWDVVGVAEDLDVSGAVDPFDRKRRPNLARWLAFEEQPFDVIVAYRVDRLTRSIRHLQQLVHWAEDHKKLVVSATEAHFDTTTPFAAVVIALMGTVAQMELEAIKERNRSAAHFNIRAGKYRGSLPPWGYLPTRVDGEWRLVPDPVQRERILEVYHRVVDNHEPLHLVAHDLNRRGVLSPKDYFAKLQGREPQGREWSATALKRSLISEAMLGYATLNGKTVRDDDGAPLVRAEPILTREQLEALRAELVKTDRAKPAVSTPSLLLRVLFCAVCGEPAYKFDAGRKIPRYRCRSFGFAQRCGNGTVPIAEWDAFCEEQVLDLLGDSERLEKVWVAGSDSAVELAEVNAELVDLTSLIGSPAYRVGSPQREALDARIAALAARQEELEGLEARPSGWEWRETGQRFGDWWREQDTSAKNTWLRSMNVRLTFDVRGGLTRTIDFGDLQEYEQHLRLGSVVEQLHAGMS

SEQ ID NO: 2508 - protein, 499 aa, Artificial Sequence
  Description of Artificial Sequence: Synthetic polypeptide
MRALVVIRLSRVTDATTSPERQLESCQRLCAQRGWDVVGVAEDLDVSGAVDPFDRKRRPNLARWLAFEEQPFDVIVAYRVDRLTRSIRHLQQLVHWAEDHKKLVVSATEAHFDTTTPFAAVVIALMGTVAQMELEAIKERNRSAAHFNIRAGKYRGSLPPWGYLPTRVDGEWRLVPDPVQRERILEVYHRVVDNHEPLHLVAHDLNRRGVLSPKDYFAKLQGREPQGREWSATALKRSLISEAMLGYATLNGKTVRDDDGAPLVRSEPILTREQLEALRAELVKTDRTKPAVSTPSLLLRVLFCAVCGEPAYKFDAGRKIPRYRCRSFGFAQRCGNGTVPISEWDAFCEEQVLDLLGDAERLEKVWVAGSDSAVELAEVNAELVDLTSLIGSPAYRVGSPQREALDARIAALAARQEELEGLEARPSGWEWRETGQRFADWWREQDTAAKNTWLRSMNVRLTFDVRGGLTRTIDFGDLQEYEQHLRLGSVVERLHTGMS

SEQ ID NO: 2509 - protein, 499 aa, Artificial Sequence
  Description of Artificial Sequence: Synthetic polypeptide
MRALVVIRLSRVTDATTSPERQLASCQQLCEQRGWEVVGVAEDLDVSGAVDPFDRKRRPNLARWLAFEDQPFDVLVAYRVDRLTRSIRHLQQLVHWAEDHKKLVVSATEPHFDTTTPFAAVVIALMGTVAQMELEAIKERTRSTAHFNIRAGKYRGSLPPWGYMPARVDGEWRLIVDPVQRERILEVYHRVVDNHEPLHLIAHDLNGRGVLSPKDYFATLQGREPKGREWSATALKRSLISDAMLGYATLNGKTVRDDTGAPLVRAEPILTREQLESVRAELVKTDRAKPSVSTPSMLLRVLHCGVCGEPAYKFDAGRKIPRYRCRSFGYAVRCGNGTVPIAEWDAFCEEQVLDLLGDAERLEKVWVAGSDAAVELAEVNAELVDLTSLIGSPAYRAGSPQRTALDARIAALAARQEELEGLEARPSGWEWRETGQRFAEWWAEQDTAAKNTWLRSMNVRLTFDVRGGLTRTIDFGDLQEYEQHLRLGSVVERLHTGMS

SEQ ID NO: 2510 - protein, 499 aa, Artificial Sequence
  Description of Artificial Sequence: Synthetic polypeptide
MRALVVIRLSRVTDATTSPERQLESCQQLCAQRGWDVVGVAEDLDVSGAVDPFDRKRRPNLARWLAFEEQPFDVIVAYRVDRLTRSIRHLQQLVHWAEDHKKLVVSATEAHFDTTTPFAAVVIALMGTVAQMELEAIKERNRSAAHFNIRAGKYRGSLPPWGYLPTRVDGEWRLVPDPVQRERILEVYHRVVDNHEPLHLVAHDLNRRGVLSPKDYFAKLQGREPQGREWSATALKRSLISEAMLGYATLNGKTVRDDDGAPLVRSEPILTREQLEALRAELVKTDRTKPAVSTPSLLLRVLFCAVCGEPAYKFDAGRKIPRYRCRSFGFAQRCGNGTVPISEWDAFCEEQVLDLLGDAERLEKVWVAGSDSAVELAEVNAELVDLTSLIGSPAYRVGSPQREALDARIAALAARQEELEGLEARPSGWEWRETGQRFGDWWREQDTAAKNTWLRSMNVRLTFDVRGGLTRTIDFGDLQEYEQNLRLGNVVERLHTGMS

SEQ ID NO: 2511 - protein, 499 aa, Artificial Sequence
  Description of Artificial Sequence: Synthetic polypeptide
MRALVVIRLSRVTDATTSPERQLESCQQLCAQRGWDVVGVAEDLDVSGAVDPFDRKRRPNLARWLAFEEQPFDVIVAYRVDRLTRSIRHLQQLVHWAEDHKKLVVSATEAHFDTTTPFAAVVIALMGTVAQMELEAIKERNRSAAHFNIRAGKYRGSLPPWGYLPTRVDGEWRLVPDPVQRERILEVYHRVVDNHEPLHLVAHDLNRRGVLSPKDYFAKLQGREPQGREWSATALKRSLISEAMLGYATLNGKTVRDDDGAPLVRSEPILTREQLEALRAELVKTDRTKPAVSTPSLLLRVLFCAVCGEPAYKFDAGRKIPRYRCRSFGFAQRCGNGTVPISEWDAFCEEQVLDLLGDAERLEKVWVAGSDSAVELAEVNAELVDLTSLIGSPAYRVGSPQREALDARIAALAARQEELEGLEARPSGWEWRETGQRFADWWREQDTAAKNTWLRSMNVRLTFDVRGGLTRTIDFGDLQEYEQHLRLGSVVERLHTGMS

SEQ ID NO: 2512 - protein, 498 aa, Artificial Sequence
  Description of Artificial Sequence: Synthetic polypeptide
MPTYDRSMRVIGRLRISRQTEESTSIDRQRELIQNWADTHDHEIVGWAEDKDVSGSVDPFDTPGLGPWLKRDRLDDWDILVAWKLDRIARRAIAINRVFHLCQEHDKTLVCISDNIDLSTWVGRLIANVIAGVAEGELEAIRERTLASHRKLRELGRWPGGRPAYGYKAVENENGPGWKLVHDEYSATIMREIVDRTLQGEAGNAIAQDLQARGVLPPAEYRRQMNGEKLRGGEWMGQVIRRMLKSRTLLGHVTHQKVTVIHETEGTPILKGEPLVTLEEFEELQAILGGSSRPKNHNRSTGASPMLDVALCGECGKPLHLRTQRTERKTKVHVHRYYYCPDKHGQALRAEIVERTVEEQFLDMFGDKPAMERVFREGENHEIEIKQAIQSIEALTPLLGAATSGTVLKSLTDQISAISNRVTYLESLPKAESGYILRATGKTYREEWESRDEQGRRSLLKRSGVTVTFLLQGKTRTTEGALQTEIKFPGDVEERLAS

SEQ ID NO: 2513 - protein, 498 aa, Artificial Sequence
  Description of Artificial Sequence: Synthetic polypeptide
MRVLGRLRISRATEESTSIERQREIVEQWAAAHDHEIVGWAEDQDVSGSVDPFDAPALGPWLSEHRKHEWDILCAWKLDRLSRRAIPMNKLFGWMIDNDKTLVCVSENLDLGTWVGRMIANVIAGVAEGELEAIRERTTASHKKLRELGRWAGGPTYYGYVPKPRDSAGWELDIDPHAAGVLKEIIEKTIAGQSTESIVVELNERGELAPSDYLRKRTGKPLRGTKWNTSTIRHQLKSKTLLGHMTHKGQTVYDEAGLPVQKGPALIDRDTFKQLQDALEARGINRTKRVTGASPLLGVAVCDVCGGPMYYRSTSNRNNTGLLRQYICKHGRYGKTQANGGEPYNIIQADLLEAHVEEQFLWRMGDKRRIERVFVPGEGHQDELETAERAVEDLTSLLGTITQASARSRLLAQLAAAHDRLSRLEELPASEPRWEIRETGDTYAEAWQKATTEERRQIMLKAGVQMRVQMKDRVPRVFAGVLHSNWIEPTDIEERLLA

SEQ ID NO: 2514 - protein, 498 aa, Artificial Sequence
  Description of Artificial Sequence: Synthetic polypeptide
MRVLGRLRISRATEESTSIERQRELVEQWAAAHEHEIVGWAVDQDVSGSVDPFDAPALGPWLSDHRKHEWDILCAWKLDRLSRRAIPMNKLFGWMIDNDKTLVCVSENLDLGTWVGRMIANVIAGVAEGELEAIRERTTASHKKLRELGRWAGGPTYYGYVPKPRDGAGWELDIDPHAAGVLREIIEKTIAGQSTESIVVELNERGELSPSDYHRKRSGKPIRGTKWNTSWLRTQLKSKTLLGHMTHNGETVYDDAGLPVQKGPALIDRDTYKQLQDALQSRGINRTKRRTGASPLLGVAVCDVCDGPLYYRQTKNQKGTAMLRQYICKHGRYGNTKANGGEPYNIIQADLLEATVEELFLSKMGDLPRVERVFIPGEGHQHELETAERAVEDLTSLLGTITQEGARKRLLAQLSAAHERLAHLEELPSSEPRWETRETGETYREAWESATTEERRQILLKAGVTLKVQMKGRVPRVHPGVIVANWIEPHDIEKRLAS

SEQ ID NO: 2515 - protein, 498 aa, Artificial Sequence
  Description of Artificial Sequence: Synthetic polypeptide
MPTYDRSMRVIGRLRISRQTEESTSIERQRELIQNWADTHDHEIVGWAEDKDVSGSVDPFDTPGLGPWLKRDRLDDWDILVAWKLDRIARRAIAINRVFHLCQEHDKTLVCISDNIDLSTWVGRLIANVIAGVAEGELEAIRERTLASHRKLRELGRWPGGRPAYGYKAVENENGPGWKLVHDEYSATIMREIVDRTLQGEAGNAIAQDLQARGVLPPAEYRRQMNGEKLRGGEWMGQVIRKMLKSRTLLGHVTHQQVTVINEKEGTPILKGEPLVSLEEWEELQAMLGGSSRPKNHNRSTGASPMLDVALCGECGKPLHLRTQRTERKTKVHVHRYYYCPDKHGQAIRAEIVERTVEEQFLDMFGDKPAMERVFREGENHEIEIKQAIQSIEALTPLLGAATSGTVLKSLTDQISAISNRVTYLESLPKAESGYILRATGKTYREEWESRDEQGRRSLLKRSGVTVTFLLQGKTRTTEGALQTEIKFPGDVEERLAS

SEQ ID NO: 2516 - protein, 498 aa, Artificial Sequence
  Description of Artificial Sequence: Synthetic polypeptide
MRVLGRLRISRATEESTSIERQREIVEQWASVNDHEIVGWAVDQDVSGSVDPFDAPALGPWLSDHRKHEWDILCAWKLDRLSRRAIPMNKLFGWMIDNDKTLVCVSENLDLGTWVGRMIANVIAGVAEGELEAIRERTTASHKKLRELGRWAGGPTYYGYIPKPRDGAGWELDIDPHAASVLREIIEKTIAGVPSETIVVELNERGELSPSDYHRKRNGKPVKGTAWNTSWLRQQLKSKTLLGHMTHKGETVYDDAGLPVQKGPALIDRDTYKQLQDALESRGINRTRRRTGASPLLGVAVCDVCDGPLYYRQTKNSKGTGMLRQYICKHGRYGNTKANGGEPYNIIQADLLEATVEELFLSKMGDQPRVERVFIPGEGHQHELETAERAVEDLTSLLGTVTQEGARKRLLAQLAAAHERLAHLEELPSSEPRWETRETGETYREAWEGATTEERRQILLKAGVTLKVQMKDRVPRVHPGVIVANWIEPHDIEKRLAS

SEQ ID NO: 2517 - protein, 498 aa, Artificial Sequence
  Description of Artificial Sequence: Synthetic polypeptide
MPTYDRSMRVIGRLRISRQTEESTSIERQRELIQNWADTHDHEIVGWAEDKDVSGSVDPFDTPGLGPWLKRDRLDDWDILVAWKLDRIARRAIAINRVFHLCQEHDKTLVCISDNIDLSTWVGRLIANVIAGVAEGELEAIRERTLASHRKLRELGRWPGGRPAYGYKAVERTDGPGWKLVHDEYSATIMREIVDRTLQGEAGNAIAQDLQERGVLTPAEYRREMNGEKLRGGEWMGQVIRKMLKSRTLLGHVTHQQVTVINEKEGTPILKGEPLVSLEEWEELQAILGGSSRPKNHNRSTGASPMLDVALCGECGKPLHLRTQRTERKTKVHVHRYYYCPDKHGQALRAEIVERTVEEQFLDMFGDKPAMERVFREGENHEIEIKQAIQSIEALTPLLGAATSGTVLKSLTDQISAISNRVTYLESLPKAESGYILRATGKTYREEWESRDEQGRRSLLKRSGVTVTFLLQGKTRTTEGALQTEIKFPGDVEERLAS

SEQ ID NO: 2518 - protein, 498 aa, Artificial Sequence
  Description of Artificial Sequence: Synthetic polypeptide
MRVLGRLRISRATEESTSIERQREIVEQWASVNDHEIVGWAVDQDVSGSVDPFDAPALGPWLSEHRKHEWDILVAWKLDRLSRRAIPMNKLFGWMIDNEKTLVCVSENLDLGTWVGRMIANVIAGVAEGELEAIRERTTASHKKLRELGRWAGGPTYYGYVPKPRDGAGWELDIDPHAAGVLTEIIEKTIAGQSTESIVVELNERGELAPSDYHRKRNGKPIRGTKWSTSWLRSQLKSKTLLGHMTHNGETVYDDAGLPVQKGPALVDRDTYKQLQDALESRGINRTRRRTGASPLLGVAVCDVCEGPLYYRQTKNAKGTAMLRQYICKHGRYGNTQANGGEPYNIIQADLLEATVEELFLSKMGDLPRVERVFIPGEGHQHELETAERAVEDLTSLLGTITQESARKRLLAQLAAAHERLAHLEELPSSEPRWETRETGETYREAWEGATVEERRQILLKAGVTLKVQMKDRVPRVHPGVIVANWIEPHDIEKRLAS

SEQ ID NO: 2519 - protein, 498 aa, Artificial Sequence
  Description of Artificial Sequence: Synthetic polypeptide
MPTYDRSMRVIGRLRISRQTEESTSIERQRELIQNWADTHEHEIVGWAEDKDVSGSVDPFDTPGLGPWLKRDRLDDWDILVAWKLDRIARRAIAINRVFHLCQEHDKTLVCISDNIDLSTWVGRLIANVIAGVAEGELEAIRERTLASHRKLRELGRWPGGRPAYGYKAVENENGPGWKLVHDEYSATIMREIVDRTLQGEAGNAIAQDLQARGVLPPAEYRRQMNGEKLRGGEWMGQVIRKMLKSRTLLGHVTHQQVTVINEKEGTPILKGEPLVSLEEWEELQAMLGGSSRPKNHNRSTGASPMLDVALCGECGKPLHLRTQRTERKTKVHVHRYYYCPDKHGQAIRAEIVERTVEEQFLDMFGDKPAMERVFREGENHEIEIKQAIQSIEALTPLLGAATSGTVLKSLTDQISAISNRVTYLESLPKAESGYILRATGKTYREEWESRDEQGRRSLLKRSGVTVTFLLQGKTRTTEGALQTEIKFPGDVEERLAS

SEQ ID NO: 2520 - protein, 498 aa, Artificial Sequence
  Description of Artificial Sequence: Synthetic polypeptide
MPTYDRSMRVIGRLRISRQTEESTSIERQRELIQNWADTHDHEIVGWAEDKDVSGSVDPFDTPGLGPWLKRDRLDDWDILVAWKLDRIARRAIAINRVFHLCQEHDKTLVCISDNIDLSTWVGRLIANVIAGVAEGELEAIRERTLASHRKLRELGRWPGGRPAYGYKAVENENGPGWKLVHDEYSATIMREIVDRTLQGEAGNAIAQDLQARGVLPPAEYRRQMNGEKLRGGEWMGQVIRRMLKSRTLLGHVTHQKVTVIHETEGTPILKGEPLVTLEEFEELQAILGGSSRPKNHNRSTGASPMLDVALCGECGKPLHLRTQRTERKTKVHVHRYYYCPDKHGQALRAEIVERTVEDQFLDMFGDKPAMERVFREGENHEIEIKQSIQSIEALTPLLGAATSGTVLKSLTDQISAISNRVTYLESLPKAESGYILRPTGKTYREEWESRDEQGRRSLLKRSGVTVTFLLQGKTRTTEGALQTEIKFPGDVEERLAS

SEQ ID NO: 2521 - protein, 498 aa, Artificial Sequence
  Description of Artificial Sequence: Synthetic polypeptide
MPTYDRSMRVIGRLRISRQTEESTSIERQRELIQNWADTHEHEIVGWAEDKDVSGSVDPFDTPGLGPWLKRDRLDDWDILVAWKLDRIARRAIAINRVFHLCQEHDKTLVCISDNIDLSTWVGRLIANVIAGVAEGELEAIRERTLASHRKLRELGRWLGGRPAYGYKAVENENGPGWKLVHDEYSATIMREIVDRTLQGEAGNAIAQDLQARGVLPPAEYRRQMNGEKLRGGEWMGQVIRKMLKSRTLLGHVTHQQVTVINEKEGTPILKGEPLVSLEEWEELQAMLGGSSRPKNHNRSTGASPMLDVALCGECGKPLHLRTQRTERKTKVHVHRYYYCPDKHGQAIRAEIVERTVEEQFLDMFGDKPAMERVFREGENHEIEIKQAIQSIEALTPLLGAATSGTVLKSLTDQISAISNRVTYLESLPKAESGYILRATGKTYREEWESRDEQGRRSLLKRSGVTVTFLLQGKTRTTEGALQTEIKFPGDVEERLAS

SEQ ID NO: 2522 - protein, 498 aa, Artificial Sequence
  Description of Artificial Sequence: Synthetic polypeptide
MRVLGRLRISRATEESTSIERQRELVEQWAAAHEHEIVGWAVDQDVSGSVDPFDAPALGPWLSDHRKHEWDILCAWKLDRLSRRAIPMNKLFGWMIDNDKTLVCVSENLDLGTWVGRMIANVIAGVAEGELEAIRERTTASHKKLRELGRWAGGPTYYGYVPKPRDGAGWELDIDLHAAGVLREIIEKTIAGQSTESIVVELNERGELSPSDYHRKRSGKPIRGTKWNTSWLRTQLKSKTLLGHMTHNGETVYDDAGLPVQKGPALIDRDTYKQLQDALQSRGINRTKRRTGASPLLGVAVCDVCDGPLYYRQTKNQKGTAMLRQYICKHGRYGNTKANGGEPYNIIQADLLEATVEELFLSKMGDLPRVERVFIPGEGHQHELETAERAVEDLTSLLGTITQEGARKRLLAQLSAAHERLAHLEELPSSEPRWETRETGETYREAWESATTEERRQILLKAGVTLKVQMKGRVPRVHPGVIVANWIEPHDIEKRLAS

SEQ ID NO: 2523 - protein, 498 aa, Artificial Sequence
  Description of Artificial Sequence: Synthetic polypeptide
MPTYDRSMRVIGRLRISRQTEESTSIERQRELIQNWADTHDHEIVGWAEDKDVSGSVDPFDTPGLGPWLKRDRLDDWDILVAWKLDRIARRAIAINRVFHLCQEHDKTLVCISDNIDLSTWVGRLIANVIAGVAEGELEAIRERTLASHRKLRELGRWPGGRPAYGYKAVENENGPGWKLVHDEYSATIMREIVDRTLQGEAGNAIAQDLQARGVLPPAEYRRQMNGEKLRGGEWMGQVIRRMLKSRTLLGHVTHQKVTVIHETEGTPILKGEPLVTLEEFEELQAILGGSSRPKNHNRSTGASPMLDVALCGECGKPLHLRTQRTERKTKVHVHRYYYCPDKHGQALRAEIVERTVEEQFLDMFGDKPAMERVFREGENHEIEIKQAIQSIEALTPLLGAATSGTVLKSLTDQISAISNRVTYLESLPKAESGYILRATGKTYREEWESRDEQGRRSLLKRSGVTVTFLLQGKTRTTEGALQTEIKFPGDVEERLAS

SEQ ID NO: 2524 - protein, 498 aa, Artificial Sequence
  Description of Artificial Sequence: Synthetic polypeptide
MPTYDRSMRVIGRLRISRQTEESTSIERQRELIQNWADTHDHEIVGWAEDKDVSGSVDPFDTPGLGPWLKRDRLDDWDILVAWKLDRIARRAIAINRVFHLCQEHDKTLVCISDNIDLSTWVGRLIANVIAGVAEGELEAIRERTLASHRKLRELGRWPGGRPAYGYKAVERTDGPGWKLVHDEYSATIMREIVDRTLQGEAGNAIAQDLQARGVLPPAEYRRQMNGEKLRGGEWMGQVIRKMLKSRTLLGHVTHQQVTVINEKEGTPILKGEPLVSLEEWEELQAMLGGSSRPKNHNRSTGASPMLDVALCGECGKPLHLRTQRTERKTKVHVHRYYYCPDKHGQAIRAEIVERTVEEQFLDMFGDKPAMERVFREGENHEIEIKQAIQSIEALTPLLGAATSGTVLKSLTDQISAISNRVTYLESLPKAESGYILRATGKTYREEWESRDEQGRRSLLKRSGVTVTFLLQGKTRTTEGALQTEIKFPGDVEERLAS

SEQ ID NO: 2525 - protein, 498 aa, Artificial Sequence
  Description of Artificial Sequence: Synthetic polypeptide
MPTYDRSMRVIGRLRISRQSEESTSIDRQRELIQNWADTHDHEIVGWAEDIDVSGSVDPFEAPGLGPWLKRDRLGEWDILVAWKLDRIARRAIAINRVFHLCQEHDKTLVCISDNIDLSTWVGRLIANVIAGVAEGELEAIRERTLASHRKLRELGRWPGGRPAYGYKAVERTDGPGWKLVHDEYSATIMREIVDRTLQGEAGNAIAQDLQERGVLPPAEYRRQMNGEKLRGGEWMGQVIRKMLKSRTLLGHVTHQQVTVINEKEGTPILKGEPLVSLEEWEELQAMLGGSSRPKNHNRSTGASPMLDVALCGECGKPLHLRTQRTERKTKVHVHRYYYCPDKHGQALRAEIVERTVEEQFLDMFGDKPAMERVFREGENHEIEIKQSIQSIEALTPLLGAATSGTVLKSLTDQISAISNRVTYLESLPKAESGYILRPTGKTYREEWESRDEQGRRSLLKRSGVTVTFLLQGKTRTTEGALQTEIKFPGDVEERLAS

SEQ ID NO: 2526 - protein, 498 aa, Artificial Sequence
  Description of Artificial Sequence: Synthetic polypeptide
MRVLGRLRISRATEESTSIERQRELVEQWAAAHEHEIVGWAVDQDVSGSVDPFDAPALGPWLSDHRKHEWDILCAWKLDRLSRRAIPMNKLFGWMIDNDKTLVCVSENLDLGTWVGRMIANVIAGVAEGELEAIRERTTASHKKLRELGRWAGGPTYYGYVPKPRDGAGWELDIDPHAAGVLREIIEKSIAGQSTESIVVELNERGELSPSDYHRKRGGKPIRGTKWNTSWLRTQLKSKTLLGHMTHNGETVYDDAGLPVQKGPALIDRDTYKQLQDALQSRGINRTKRRTGASPLLGVAVCDVCDGPLYYRQTKNQKGTAMLRQYICKHGRYGNTKANGGEPYNIIQADLLEATVEELFLSKMGDLPRVERVFIPGEGHQHELETAERAVEDLTSLLGTITQEGARKRLLAQLSAAHERLAHLEELPSSEPRWETRETGETYREAWESATTEERRQILLKAGVTLKVQMKGRVPRVHPGVIVANWIEPHDIEKRLAS

SEQ ID NO: 2527 - protein, 497 aa, Artificial Sequence
  Description of Artificial Sequence: Synthetic polypeptide
MRVLGRIRLSRMMEESTSVERQREFIETWARQNDHEIVGWAEDLDVSGSVDPFDTQGLGPWLKEPKLREWDILCAWKLDRLARRAVPLHKLFGMCQDEQKVLVCVSDNIDLSTWVGRLVASVIAGVAEGELEAIRERTLSSQRKLRELGRWAGGKPAYGFKAQEREDSAGYELVHDEHAANVMLGVIEKVLAGQSTESVARELNEAGELAPSDYIRARAGRKTRGTKWSNAQIRQLLKSKTLLGHVTHNGATVRDDDGIPIRKGPALISEEKFDQLQAALDARSFKVTNRSAKASPLLGVAICGLCGRPMHIRQHRRNGNLYRYYRCDSGSHSGGGGAAPEHPSNIIKADDLEALVEEHFLDEVGRFNVQEKVYVPASDHRAELDEAVRAVEELTQLLGTMTSATMKSRLMGQLTALDERIARLENLPSEEARWDYRATDQTYAEAWEEADTEGRRQLLIRSGITAEVKVTGGDRGVRGVLEFHLKVPEDVRERLSA

SEQ ID NO: 2528 - protein, 497 aa, Artificial Sequence
  Description of Artificial Sequence: Synthetic polypeptide
MRVLGRIRLSRMMEESTSVERQREFIETWARQNDHEIVGWAEDLDVSGSVDPFDTQGLGPWLKEPKLREWDILCAWKLDRLARRAVPLHKLFGMCQDEQKVLVCVSDNIDLSTWVGRLVASVIAGVAEGELEAIRERTLSSQRKLRELGRWAGGKPAYGFKAQEREDSAGYELVHDEHAANVMLGVIEKVLAGQSTESVARELNEAGELAPSDYIRARAGRKTRGTKWSNAQIRQLLKSKTLLGHVTHNGSTVRDDDGIPIRKGPALISEEKFDQLQAALDARSFKVTNRSAKASPLLGVAICGLCGRPMHIRQHRRNGNLYRYYRCDSGSHSGGGGAAPEHPSNIIKADDLETLVEEHFLDEVGRFNVQEKVYVPASDHRAELDEAVRAVEELTQLLGTMTSATMKSRLMGQLTALDERIARLENLPSEEARWDYRATDQTYTEAWEEADTEGRRQLLIRSGITAEVKVTGGDRGVRGVLEFHLKVPEDVRERLSA

SEQ ID NO: 2529 - protein, 497 aa, Artificial Sequence
  Description of Artificial Sequence: Synthetic polypeptide
MRVLGRIRLSRMMEESTSVERQREFIETWARQNDHEIVGWAEDLDVSGSVDPFDTQGLGPWLKEPKLREWDILCAWKLDRLARRAVPLHKLFGMCQDEQKVLVCVSDNIDLSTWVGRLVASVIAGVAEGELEAIRERTLSSQRKLRELGRWAGGKPAYGFKAQEREGSAGYELVHDEHAANVMLGVIEKVLAGQSTESVARELNEAGELAPSDYIRARAGRKTRGTKWSNAQIRQLLKSKTLLGHVTHNGSTVRDDDGIPIRKGPALISEEKFDQLQAALDARSFKVTNRSAKASPLLGVAICGLCGRPMHIRQHRRNGNLYRYYRCDSGSHSGGGGAAPEHPSNIIKADDLEALVEEHFLDEVGGFNVQEKVYVPASDHRAELDEAVRAVEELTQLLGTMTSATMKSRLMSQLTALDERIARLENLPSEEARWDYRATDQTYAEAWEEADTEGRRQLLIRSGITAEVKVTGGDRGVRGVLEFHLKVPEDVRERLSA

SEQ ID NO: 2530 - protein, 497 aa, Artificial Sequence
  Description of Artificial Sequence: Synthetic polypeptide
MRVLGRIRLSRMMEESTSVERQREFIETWARQNDHEIVGWAEDLDVSGSVDPFDTQGLGPWLKEPKLREWDILCAWKLDRLARRAVPLHKLFGMCQDEQKVLVCVSDNIDLSTWVGRLVASVIAGVAEGELEAIRERTLSSQRKLRELGRWAGGKPAYGFKAQEREDSAGYELVHDEHAANVMLGVIEKVLAGQSTESVARELNEAGELAPSDYIRARAGRKTRGTKWSNAQIRQLLKSKTLLGHVTHNGSTVRDDDGIPIRKGPALISEEKFDQLQAALDARSFKVTNRSAKASPLLGVAICGLCGRPMHIRQHRRNGNLYRYYRCDSGSHSGGGGAAPEHPSNIIKADDLETLVEEHFLDEVGRFNVQEKVYVPASDHRAELDEAVRAVEELTQLLGTMTSATMKSRLMGQLTALDERIARLENLPSEEARWDYRATDQTYAEAWEEADTEGRRQLLIRSGITAEVKVTGGGRGVRGVLEFHLKVPEDVRERLSA

SEQ ID NO: 2531 - protein, 497 aa, Artificial Sequence
  Description of Artificial Sequence: Synthetic polypeptide
MRVLGRIRLSRMMEESTSVERQREFIETWARQNDHEIVGWAEDLDVSGSVDPFDTQGLGPWLKEPKLREWDILCAWKLDRLARRAVPLHKLFGMCQDEQKVLVCVSDNIDLSTWVGRLVASVIAGVAEGELEAIRERTLSSQRKLRELGRWAGGKPAYGFKAQEREDSAGYELVHDEHAANVMLGVIEKVLAGQSTESVARELNEAGELAPSDYIRARAGRKTRGTKWSNAQIRQLLKSKTLLGHVTHNGSTVRDDDGIPIRKGPALISEEKFDQLQAALDARSFKVTNRSAKASPLLGVAICGLCGRPMHIRQHRRNGNLYRYYRCDSGSHSGGGGAAPEHPSNIIKADDLETLVEEHFLDEVGRFNVQEKVYVPASDHRAELDEAVRAVEELTQLLGTMTSATMKSRLMGQLTALDERIARLENLPSEEARWDYRATDQTYAEAWEEADTEGRRQLLIRSGITAEVKVTGGDRGVRGVLEFHLKVPEDVRERLSA

SEQ ID NO: 2532 - protein, 497 aa, Artificial Sequence
  Description of Artificial Sequence: Synthetic polypeptide
MRVLGRIRLSRMMEESTSVERQREFIETWARQNDHEIVGWAEDLDVSGSVDPFDTQGLGPWLKEPKLREWDILCAWKLDRLARRAVPLHKLFGMCQDEQKVLVCVSDNIDLSTWVGRLVASVIAGVAEGELEAIRERTLSSQRKLRELGRWAGGKPAYGFKAQEREGSAGYELVHDEHAANVMLGVIEKVLAGQSTESVARELNEAGELAPSDYIRARAGRKTRGTKWSNAQIRQLLKSKTLLGHVTHNGSTVRDDDGIPIRKGPALISEEKFDQLQAALDARSFKVTNRSAKASPLLGVAICGLCGRPMHIRQHRRNGNLYRYYRCDSGSHSGGGGAAPEHPSNIIKADDLEALVEEHFLDEVGGFNVQEKVYVPASDHRAELDEAVRAVEELTQLLGTMTSATMKSRLMGQLTALDERIARLENLPSEGARWDYRATDQTYAEAWEEADTEGRRQLLIRSGITAEVKVTGGDRGVRGVLEFHLKVPEDVRERLSA

SEQ ID NO: 2533 - protein, 497 aa, Artificial Sequence
  Description of Artificial Sequence: Synthetic polypeptide
MRVLGRIRLSRMMEESTSVERQREFIETWAQQNDHEIVGWAEDLDVSGSVDPFDTQGLGPWLKEPKLREWDILCAWKLDRLARRAVPLHKLFGMCQDEQKVLVCVSDNIDLSTWVGRLVASVIAGVAEGELEAIRERTLSSQRKLRELGRWAGGKPAYGFKAQEREDSAGYELVHDEHAANVMLGVIEKVLAGQSTESIARELNDAGELAPSDYIRARAGRKTRGTKWSNAQIRQLLKSKTLLGHVTHNGSTVRDDDGIPIRKGPALISDEKFDQLQAALDARSFKVTNRSAKASPLLGVAICGLCGRPMHIRQHRRNGNLYRYYRCDSGSHSGGGGAAPEHPSNIIKADDLEALVEEHFLDEVGGFNVQEKVYVPASDHRAELDEAVRAVEELTQLLGTMTSATMKSRLMGQLTALDERIARLENLPSEEARWDYRATDQTYAEAWEEADTEGRRQLLIRSGITAEVKVTGGDRGVRGVLEFHLKVPEDVRERLSA

SEQ ID NO: 2534 - protein, 497 aa, Artificial Sequence
  Description of Artificial Sequence: Synthetic polypeptide
MRVLGRIRLSRMMEESTSVERQREFIETWARQNDHEIVGWAEDLDVSGSVDPFDTQGLGPWLKEPKLREWDILCAWKLDRLARRAVPLHKLFGMCQDEQKVLVCVSDNIDLSTWVGRLVASVIAGVAEGELEAIRERTLSSQRKLRELGRWAGGKPAYGFKAQEREGSAGYELVHDEHAANVMLGVIEKVLAGQSTESVARELNEAGELAPSDYIRARAGRKTRGTKWSNAQIRQLLKSKTLLGHVTHNGSTVRDDDGIPIRKGPALISEEKFDQLQAALDARSFKVTNRSAKASPLLGVAICGLCGRPMHIRQHRRNGNLYRYYRCDSGSHSGGGGAAPEHPSNIIKADDLEALVEEHFLDEVGGFNVQEKVYVPASDHRAELDEAVRAVEELTQLLGTMTSATMKSRLMGQLTALDERIARLENLPSEEARWDYRATDQTYAEAWEEADTEGRRQLLIRSGITAEVKVTGGDRGVRGVLEFHLKVPEDVRERLSA

SEQ ID NO: 2535 - protein, 497 aa, Artificial Sequence
  Description of Artificial Sequence: Synthetic polypeptide
MRVLGRIRLSRMMEESTSVERQREFIETWARQNDHEIVGWAEDLDVSGSVDPFDTQGLGPWLKEPKLREWDILCAWKLDRLARRAVPLHKLFGMCQDEQKVLVCVSDNIDLSTWVGRLVASVIAGVAEGELEAIRERTLSSQRKLRELGRWAGGKPAYGFKAQEREDSAGYELVHDEHAANVMLGVIEKVLAGQSTESVARELNEAGELAPSDYIRARAGRKTRGTKWSNAQIRQLLKSKTLLGHVTHNGATVRDDDGIPIRKGPALISEEKFDQLQAALDARSFKVTNRSAKASPLLGVAICGLCGRPMHIRQHRRNGNLYRYYRCDSGSHSGGGGVAPEHPSNIIKADDLETLVEEHFLDEVGRFNVQEKVYVPASDHRAELDEAVRAVEELTQLLGTMTSATMKSRLMGQLTALDERIARLENLPSEEARWDYRATSQTYAEAWEEADTEGRRQLLIRSGITAEVKVTGGDRGVRGVLEFHLKVPEDVRERLSA

SEQ ID NO: 2536 - protein, 496 aa, Artificial Sequence
  Description of Artificial Sequence: Synthetic polypeptide
MAKQLRALVGARVSVVQGPQKVSHLAQQETGEKWVRERGHLIVGTFRDLDVSATVSPFERPDLGPWLSPEQEDEWDVLVFSKIDRMFRSTRDCVKFAEWAEQRKKILVFAEDSMTLNYRDQSDSLEKMMSELFIYIGSFFAQLELNRFKSRAKDSHRVLRGMDRWASGVPPLGFQVVDHPSGKGKGLDTDPVGKSLLYEMAGKLLEGWSFIRIAAWLNELGALTNMDRARQAKGHAPKSKPWNVSNVIDILTSPRTQGLKMTGRGKHAKTVLNAEGEPIRMAPATFDADTWKKIQEAAAKRQGNPRSRTHSANPMLGVGFCGVCGASLAQQFSRPRGGDKVYRSYRCGRTPLNCNGVSIRADDADTLMEETFMAKWGDERVTNKVFVPGEDHSEELETVVATIERLRRESDAGLIVSADDERVYLERMKSLIDRRTALEATPRRVAGWAIEELPHTYRDVWETEDHRQLLIDKGIRFELKSSKPVMSFAMFESSTS

SEQ ID NO: 2537 - protein, 495 aa, Artificial Sequence
  Description of Artificial Sequence: Synthetic polypeptide
MIRLSRVTDATTSPERQLESCQQLCAQRGWDVVGVAEDLDVSGAVDPFDRKRRPNLARWLAFEEQPFDVIVAYRVDRLTRSIRHLQQLVHWAEDHKKLIVSATEAHFDTTTPFAAVVIALMGTVAQMELEAIKERNRSAAHFNIRAGKYRGSLPPWGYLPTRVDGEWRLVPDPVQRERILEVYHRVVDNHEPLHLVAHDLNQRGILSPKDYFAKLQGREPKGREWSATALKRSLISEAMLGYTTLNGKTVRDDDGAPLVRAEPILTREQLEALRAELVKTDRTKPAVSTPSLLLRVLFCAVCGEPAYKFAGGGRKHPRYRCRSMGFPKHCGNGTVAMAEWDAFCEEQVLDLLGDAERLEKVWVAGSDSAVELAEVNAELVDLTSLIGSPAYRVGSPQREALDARIAALAARQEELEGLEARPSGWEWRETGQRFGDWWREQDIAAKNTWLRSMNVRLTFDVRGGLTRTIDFGDLQEYEQHLRLGSVVERLHTGMS

SEQ ID NO: 2538 - protein, 495 aa, Artificial Sequence
  Description of Artificial Sequence: Synthetic polypeptide
MIRLSRVTDATTSPERQLESCQQLCAQRGWDVVGVAEDLDVSGAVDPFDRKRRPNLARWLAFEEQPFDVIVAYRVDRLTRSIRHLQQLVHWAEDHKKLVVSATEAHFDTTTPFAAVVIALMGTVAQMELEAIKERNRSAAHFNIRAGKYRGSLPPWGYLPTRVDGEWRLVPDPVQRERILEVYHRVVDSHEPLHLVAHDLNRRGVLSPKDYFAKLQGREPQGREWSATALKRSLISEAMLGYATLNGKTVRDDDGAPLVRSEPILTREQLEALRAELVKTDRTKPAVSTPSLLLRVLFCAVCGEPAYKFAGGQRKNPRYRCRSMGFPKHCGNGTVAMAEWDAFCEEQVLDLLGDAERLEKVWVAGSDSAVELAEVNAELVDLTSLIGSPAYRAGSPQREALDARIAALAARQEELEGLEARPSGWEWRETGQRFGDWWREQDTSGKNTWLRSMNVRLTFDVRGGLTRTIDFGDLQEYEQHLRLGSVVERLHDGMS

SEQ ID NO: 2539 - protein, 495 aa, Artificial Sequence
  Description of Artificial Sequence: Synthetic polypeptide
MIRLSRVTDATTSPERQLESCQQLCAQRGWDVVGVAEDLDVSGAVDPFDRKRRPNLARWLSFEEQPFDVIVAYRVDRLTRSIRHLQQLVHWAEDHKKLIVSATEAHFDTTSPFAAVVIALMGTVAQMELEAIKERNRSAAHFNIRAGKYRGSLPPWGYLPTRVDGEWRLVPDPVQRERILEVYHRVVDNHEPLHQIAHDLNQRGILSPKDYFAKLQGREPKGREWSATALKRSLISEAMLGYTTLNGKTVRDDDGAPLVRAEPILTREQLEALRAELVKTDRTKPAVSTPSLLLRVLFCAVCGEPAYKFTGGGRKNARYRCRSWGWAQRCGNGTVAMAEWDAFCEEQVLDLLGDSERLEKVWVAGSDSAVELAEVNAELVDLTSLIGSPAYRAGSPQREALDARIAALAARQEELEGLEARPSGWEWRETGQRFGDWWRDQDTAGKNTWLRSMNVRLTFDVRGGLTRTIDFGDLQEYEQHLRLGSVVEQLHTGMS

SEQ ID NO: 2540 - protein, 495 aa, Artificial Sequence
  Description of Artificial Sequence: Synthetic polypeptide
MTTRAAIYLRISEDKTGEEKGVDRQLQDALAVIRERGWVQAGDPYQDNSISASKRNVRRPAYDRMVADYQAGKFDAIVCYDLDRLTRQPRQLEDWIDAAQETGLAIVTTNGEADLSTDGGRMFARVKAAVARSEIERKGARHRRANAQRVEEGIPHGGRRRYGYEPGGMVPRPEEAAVVRRCFEAVAAGQSIRSIVTDLRREGVPGGTGSGWGNSRLRYMLLNPSYAGLLHVGEEALPSEKVQPIVSRELYEEVRAILTDDQRRTSPGPGRKHLASGFVACGVEDCPNTLRVHSGFYRCQIKTLNSNDRYIDPTGAAHPSIKVDLLDARLRKEMALALLTTTPAQLRGDDAPSVAPLIAQLDRLETAVAATMADRDDGLVSPQAARARLLTLRDERLEVEAALDAARASRTSSVTLSEMARDLILSSGVPHGPTRVIREVLPRVVEAIEAMDIDRQRDALQQLLAVQVQPGRGTDRIKVWHLVAEHLNPDLIPDV

SEQ ID NO: 2541 - protein, 495 aa, Artificial Sequence
  Description of Artificial Sequence: Synthetic polypeptide
MRVIGRLRISRQSEESTSIDRQRELIQNWADTHDHEIVGWAEDIDVSGSVDPFEAPGLGPWLKRDRLGEWDILVAWKLDRIARRAIAINRVFHLCQEHDKTLVCISDNIDLSTWVGRLIANVIAGVAEGELEAIRERTLASHRKLRELGRWPGGRPAYGYKAVERTDGPGWKLVHDEYSATIMREIVDRTLQGEAGNAIAQDLQERGVLTPAEYRREMNGEKLRGGEWMGQVIRKMLKSRTLLGHVTHQQVTVINEKEGTPILKGEPLVSLEEWEELQAMLGGSSRPKNHNRTTAASPMLDVALCAECEKPLHLRTQRTQRKEKLHVHRYYYCPDKHGSAIRGEDVENAVENQFLEDFGDLPAMERVFREGENHEIEIKQAIQSIEALTPLLGAATSGTVLKSLTDQISALSNRVTYLESLPKAESGYILRPTGKTYREEWEERDEQGRRALLRRSGITATFMLTGKGRGGRNPAPGALQFNLRVPADAQERLAS

SEQ ID NO: 2542 - protein, 495 aa, Artificial Sequence
  Description of Artificial Sequence: Synthetic polypeptide
MIRLSRVTDATTSPERQLESCRQLCAQRGWDVVGVAEDLDVSGAVDPFDRKRRPNLARWLAFEEQPFDVIVAYRVDRLTRSIRHLQQLVHWAEDHKKLVVSATEAHFDTTTPFAAVVIALMGTVAQMELEAIKERNRSAAHFNIRAGKYRGSLPPWGYLPTRVDGEWRLVPDPVQRERILEVYHRVVDNHEPLHLVAHDLNRRGVLSPKDYFAKLQGREPQGREWSATALKRSMISEAMLGYATLNGKTVRDDDGAPLVRAEPILTREQLEALRAELVKTDRTKPAVATPSLLLRVLFCAVCGEPAYKFAGGGRKHPRYRCRSMGFPKHCGNGTVAMAEWDAFCEEQVLDLLGDSERLEKVWVAGSDSAVELAEVNAELVDLTSLIGSPAYRVGSPQREALDARIAALAARQEELEGLEARPSGWEWRETGQRFGDWWREQDTSGKNTWLRSMNVRLTFDVRGGLTRTIDFGDLQEYEQHLRLGSVVERLHTGMS

SEQ ID NO: 2543 - protein, 494 aa, Artificial Sequence
  Description of Artificial Sequence: Synthetic polypeptide
MIRLSRVTDATTSPERQLESCQQLCAQRGWDVVGVAEDLDVSGAVDPFDRKRRPNLARWLAFEEQPFDVIVAYRVDRLTRSIRHLQQLVHWAEDHKKLVVSATEAHFDTTTPFAAVVIALMGTVAQMELEAIKERNRSAAHFNIRAGKYRGSLPPWGYLPTRVDGEWRLVPDPVQRERILEVYHRVVDNHEPLHLVAHDLNRRGVLSPKDYFAKLQGREPQGREWSATALKRSLISEAMLGYATLNGKTVRDDDGAPLVRAEPILTREQLEALRAELVKTDRAKPAVSTPSLLLRVLFCAVCGEPAYKFDAGRKIPRYRCRSFGFAQRCGNGTVPIAEWDAFCEEQVLDLLGDSERLEKVWVAGSDSAVELAEVNAELVDLTSLIGSPAYRAGSPQREALDARIAALAARQEELEGLEARPSGWEWRETGQRFGDWWREQDTSAKNTWLRSMNVRLTFDVRGGLTRTIDFGDLQEYEQHLRLGSVVEQLHAGMS

SEQ ID NO: 2544 - protein, 493 aa, Artificial Sequence
  Description of Artificial Sequence: Synthetic polypeptide
MRVLGRIRLSRVMEESTSVERQREIIETWARQNDHEIIGWAEDLDVSGSVDPFETPALGPWLTDHRKHEWDILVAWKLDRLSRRAIPMNKLFGWVMENDKTLVCVSENLDLSTWIGRMIANVIAGVAEGELEAIRERTKGSQKKLRELGRWGGGKPYYGYRAQEREDAAGWELVPDEHASAVLLSIIEKVLEGQSTESIARELNERGELSPSDYLRHRAGKPTRGGKWSNAHIRQQLRSKTLLGYSTHNGETIRDERGIAVRKGPALVSQDVFDRLQAALDSRSFKVTNRSAKASPLLGVLVCRVCERPMHLRQHHNKKRGKTYRYYQCVGGVEKTHPANLTNADQMEQLVEESFLAELGDRKIQERVYIPAESHRAELDEAVRAVEEITPLLGTVTSDTMRKRLLDQLSALDARISELEKMPESEARWEYREGDETYAEAWNRGDAEARRQLLLKSGITAAAEMKGREARVNPGVLHFDLRIPEDILERMAG

SEQ ID NO: 2545 - protein, 493 aa, Artificial Sequence
  Description of Artificial Sequence: Synthetic polypeptide
MRVLGRIRLSRVMEESTSVERQREIIETWARQNDHEIIGWAEDLDVSGSVDPFETPALGPWLTDHRKHEWDILVAWKLDRLSRRAIPMNKLFGWVMENDKTLVCVSENLDLSTWIGRMIANVIAGVAEGELEAIRERTKGSQKKLRELGRWGGGKPYYGYRAQEREDAAGWELVPDEHASAVLLSIIEKVLEGQSTESIARELNERGELSPSDYLRHRAGKPTRGGKWSNAHIRQQLRSKTLLGYSTHNGETIRDERGIAVRKGPALVSQDVFDRLQAALDSRSFKVTNRSAKASPLLGVLICRVCERPMHLRQHHNKKRGKTYRYYQCVGGVEKTHPANLTNADQMEQLVEESFLAELGDRKIQERVYIPAESHRAELDEAVRAVEEITPLLGTVTSDTMRKRLLDQLSALDARISELEKLPESEARWEYREGDETYAEAWNRGDAEARRQLLLKSGITAAAEMKGREARVNPGVLHFDLRIPEDILERMSA

SEQ ID NO: 2546 - protein, 493 aa, Artificial Sequence
  Description of Artificial Sequence: Synthetic polypeptide
MRVLGRIRLSRVMEESTSVERQREIIETWARQNDHEIIGWAEDLDVSGSVDPFETPALGPWLTDHRKHEWDILVAWKLDRLSRRAIPMNKLFGWVMENDKTLVCVSENLDLSTWIGRMIANVIAGVAEGELEAIRERTKGSQKKLRELGRWGGGKPYYGYRAQEREDAAGWELVPDEHASKVLLSIIEKVLEGQSTESIARELNERGELSPSDYLRHRAGKPTRGGKWSNAHIRQQLRSKTLLGYSTHNGETIRDERGIAVRKGPALVSQDVFDRLQAALDSRSFKVTNRSAKASPLLGVLVCRVCERPMHLRQHHNKKRGKTYRYYQCVGGVEKTHPANLTNADQMEQLVEESFLAELGDRKIQERVYIPAESHRAELDEAVRAVEEITPLLGTVTSDTMRKRLLDQLSALDARISELEKLPESEARWEYREGDETYAEAWNRGDAEARRQLLLKSGITAAAEMKGREARVNPGVLHFDLRIPEDILERMSA

SEQ ID NO: 2547 - protein, 493 aa, Artificial Sequence
  Description of Artificial Sequence: Synthetic polypeptide
MRVLGRIRLSRVMEESTSVERQREIIETWARQNDHEIIGWAEDLDVSGSVDPFETPALGPWLTDHRKHEWDILVAWKLDRLSRRAIPMNKLFGWVMENDKTLVCVSENLDLSTWIGRMIANVIAGVAEGELEAIRERTKGSQKKLRELGRWGGGKPYYGYRAQEREDAAGWELVPDEHASAVLLSIIEKVLEGQSTESIARELNERGELSPSDYLRHRAGKPTRGGKWSNAHIRQQLRSKTLLGYSTHNGETIRDERGIAVRKGPALVSQDVFDRLQVALDSRSFKVTNRSAKASPLLGVLVCRVCERPMHLRQHHNKKRGKTYRYYQCVGGVEKTHPANLTNADQMEQLVEESFLAELGDRKIQERVYIPAESHRAELDEAVRAVEEITPLLGTVTSDTMRKRLLDQLSALDARISELEKMPESEARWEYREGDETYAEAWNRGDAEARRQLLLKSGITAAAEMKGREARVNPGVLHFDLRIPEDILERMSA

SEQ ID NO: 2548 - protein, 493 aa, Artificial Sequence
  Description of Artificial Sequence: Synthetic polypeptide
MRVLGRIRLSRVMEESTSVERQREIIETWARQNDHEIIGWAEDLDVSGSVDPFETPALGPWLTDHRKHEWDILVAWKLDRLSRRAIPMNKLFGWVMENDKTLVCVSENLDLSTWIGRMIANVIAGVAEGELEAIRERTKGSQKKLRELGRWGGGKPYYGYRAQEREDAAGWELVPDEHASAVLLSIIEKVLEGQSTESIARELNERGELSPSDYLRHRAGKPTRGGKWSNAHIRQQLRSKTLLGYSTHNGETIRDERGIAVRKGPALVSQDVFDRLQAALDSRSFKVTNRSAKASPLLGVLVCRVCERPMHLRQHHNKKRGKTYRYYQCVGGVEKTHPANLTNADQMEQLVEESFLAELGDRKIQERVYVPAESHRAELDEAVRAVEEITPLLGTVTSDTMRKRLLDQLSALDARISELEKLPESEARWEYREGDETYAEAWNRGDAEARRQLLLKSGITAAAEMKGREARVNPGVLHFDLRIPEDILERMAG

SEQ ID NO: 2549 - protein, 493 aa, Artificial Sequence
  Description of Artificial Sequence: Synthetic polypeptide
MRVLGRIRLSRVMEESTSVERQREIIETWARQNDHEIIGWAEDLDVSGSVDPFETPALGPWLTDHRKHEWDILVAWKLDRLSRRAIPMNKLFGWVMENDKTLVCVSENLDLSTWIGRMIANVIAGVAEGELEAIRERTKGSQKKLRELGRWGGGKPYYGYRAQEREDAAGWELVPDEHASAVLLSIIEKVLEGQSTESIARELNERGELSPSDYLRHRAGKPTRGGKWSNAHIRQQLRSKTLLGYSTHNGETIRDERGIAVRKGPALVSQDVFDRLQVALDSRSFKVTNRSAKASPLLGVLICRVCDRPMHLRQHHNKKRGKTYRYYQCVGGVEKTHPANLTNADQMEQLVEESFLAELGDRKIQERVYIPAESHRAELDEAVRAVEEITPLLGTVTSDTMRKRLLDQLSALDARISELEKMPESEARWEYREGDETYAEAWNRGDAEARRQLLLKSGITAAAEMKGREARVNPGVLHFDLRIPEDILERMSA

SEQ ID NO: 2550 - protein, 493 aa, Artificial Sequence
  Description of Artificial Sequence: Synthetic polypeptide
MRVLGRIRLSRVMEESTSVERQREIIETWARQNDHEIIGWAEDLDVSGSVDPFETPALGPWLTDHRKHEWDILVAWKLDRLSRRAIPMNKLFGWVMENDKTLVCVSENLDLSTWIGRMIANVIAGVAEGELEAIRERTKGSQKKLRELGRWGGGKPYYGYRAQEREDAAGWELVPDEHASAVLLSIIEKVLEGQSTESIARELNERGELSPSDYLRHRAGKPTRGGKWSNAHIRQQLRSKTLLGYSTHNGETIRDERGIAVRKGPALVSQDVFDRLQVALDSRSFKVTNRSAKASPLLGVLVCRVCDRPMHLRQHHNKKRGKTYRYYQCVGGVEKTHPANLTNADQMEQLVEESFLAELGDRKIQERVYIPAESHRAELDEAVRAVEEITPLLGTVTSDTMRKRLLDQLSALDARISELEKLPESEARWEYREGDETYAEAWNRGDAEARRQLLLKSGITAAAEMKGREARVNPGVLHFDLRIPEDILERMSA

SEQ ID NO: 2551 - protein, 492 aa, Artificial Sequence
  Description of Artificial Sequence: Synthetic polypeptide
MRVLGRVRLSRFNEESTSVERQREIIENWAQQNGHEVIGFAEDIDVSRSVDPFETPGLGQWLNDKTKIDQWDIVATWKLDRLATGSIYLNKTMGWCFEHEKVIVSVTENFDLSTWVGRMIANVIAGVAEGELEAIKERTQASRKKLVSIGRWTGGRPTFGYRKVEIESGGYALEPDPESSKTLHWIVDEVLNGRSAKSLVDDMNERGVYTPADFVRYRNGKETKGAKWSVTTLLSLLRSRTLLGHIMHNGQVVLDGVGEPVLAGPPLIDVDTFNRVQATLEARSRAQKVERTDASPLLGVLVCAECGDNMYHQRQVDKRYDRLYRYYKCLNRCGQQIHAEMAEQMVENQFLDDLGDAEALTRVYIPAENHQIELEEAQRLLDGLYPLLGTVTSAHAQKRLTEQISALDSKIAQLEMLPESPARTELRPTGVTYRKLWESLDSDGRRELMVKAGIQARMKVADRPQGARATGQTGAVTFHFHIPEDLHERIAS

SEQ ID NO: 2552 - protein, 492 aa, Artificial Sequence
  Description of Artificial Sequence: Synthetic polypeptide
MRISRATEESTSIERQREIVEQWASVNDHEIVGWAVDQDVSGSVDPFDAPALGPWLSDHRKHEWDILCAWKLDRLSRRAIPMNKLFGWMIDNDKTLVCVSENLDLGTWVGRMIANVIAGVAEGELEAIRERTTASHKKLRELGRWAGGPTYYGYVPKPRDGAGWELDIDPHAAGVLKEIIEKTIAGQATEAIVVELNERGELSPSDYHRKRSGKPIRGTKWNTSWLRTQLKSKTLLGHMTHNGETVYDDAGLPVQKGPPLIDRDTYKQLQDALQSRGINRTKRRTGASPLLGVAVCDVCDGPLYYRQTKNQKGTAMLRQYICKHGRYGNTKANGGEPYNIIQADLLEATVEELFLSKMGDLPRVERVFIPGEGHQHELETAERAVEDLTSLLGTITQEGARKRLLAQLSAAHERLAHLEELPSSEPRWETRETGETYREAWESATTEERRQILLKAGVTLKVQMKGRVPRVHPGVIVANWIEPHDIEKRLAS

SEQ ID NO: 2553 - protein, 492 aa, Artificial Sequence
  Description of Artificial Sequence: Synthetic polypeptide
MRISRATEESTSIERQREIVEQWASVNDHEIVGWAVDQDVSGSVDPFDAPALGPWLSDHRKHEWDILCAWKLDRLSRRAIPMNKLFGWMIDNDKTLVCVSENLDLGTWVGRMIANVIAGVAEGELEAIRERTTASHKKLRELGRWAGGPTYYGYVPKPRDGAGWELDIDPHAAGVLKEIIEKTIAGQATEAIVVELNERGELSPSDYHRQRSGKPIRGTKWNTSWLRTQLKSKTLLGHMTHNGETVYDDAGLPVQKGPALTDRDTYKQLQDALQSRGINRTKRRTGASPLLGVAVCDVCDGPLYYRQTKNSKGTGMLRQYICKHGRYGNTKANGGEPYNIIQADLLEATVEELFLSKMGDLPRVERVFIPGEGHQHELETAERAVEDLTSLLGTITQEGARKRLLAQLSAAHERLAHLEELPSSEPRWETRETGETYREAWESATTEERRQILLKAGVTLKVQMKGRVPRVHPGVIVANWIEPHDIEKRLAS

SEQ ID NO: 2554 - protein, 492 aa, Artificial Sequence
  Description of Artificial Sequence: Synthetic polypeptide
MRISRATEESTSIERQREIVEQWASVNDHEIVGWAVDQDVSGSVDPFDAPALGPWLSDHRKHEWDILCAWKLDRLSRRAIPMNKLFGWMIDNDKTLVCVSENLDLGTWVGRMIANVIAGVAEGELEAIRERTTASHKKLRELGRWAGGPTYYGYVPKPRDGAGWELDIDPHAAGVLKEIIEKTIAGQATEAIVVELNERGELSPSDYHRQRSGKPIRGTKWNTSWLRTQLKSKTLLGHMTHNGETVYDDAGLPVQKGPALIDRDTYKQLQDALESRGINRTRRRTGASPLLGVAVCDVCDGPLYYRQTKNSKGTGMLRQYICKHGRYGNTKANGGEPYNIIQADLLEATVEELFLSKMGDQPRVERVFIPGEGHQHELETAERAVEDLTSLLGTITQESARKRLLAQLAAAHERLAHLEELPSSEPRWETRETGETYREAWESATTEERRQILLKAGVTLKVQMKDRVPRVHPGVIVANWIEPHDIEKRLAS

SEQ ID NO: 2555 - protein, 492 aa, Artificial Sequence
  Description of Artificial Sequence: Synthetic polypeptide
MRVLGRVRLSRFQEESTSVERQREIVENWAKQHDHEIIGWAEDIDVSRSVDPFDTPGLGPWFTDKTKVDQWDIVATWKLDRLATGSIYLNKMMGWCAENEKVIVSVTENFDLSTWVGRMIANVIAGVAEGELEAIKERTQASRKKLVSVGRWTGGRPTYGYRAVEIPSGGWALEPDPESSVTLAWMIDEVLAGTSANAIAKSLNERGVLTPADFVRYRNGKPTKGAKWSVTALLSLLRSRTLLGEIMHNGRTVLGDDGEPVLAGPPLIDVEKFNRVQAVLEARSLKQYMDRVDASPLLGVLVCAGCGDNMYHQRQMDKRRGVMYRYYKCLKRCGQQFHADVAEEMVENQFLNDLGDSEALTRVYIPAENHQIELEEAVRLMDGLTPLLGAVTSDHARKRLTEQISALDSKIARLEMLPESPARTELQPTGLTYRELWESLDTDGRRELMVKAGIRAAVKVEGRTVGGRGGRTTGAITFHFQIPEDLHERLAS

SEQ ID NO: 2556 - protein, 491 aa, Artificial Sequence
  Description of Artificial Sequence: Synthetic polypeptide
MQSELEERKKAFVYVRVSTYEQYVKGYSISNQKRELLQYCESMNWEVIKIFIEKGVTAKNLDLRKEANAAIEEAKKGECDYIVSLKIDRIFRNTEDLLATTRILLGYDVILKFKEQETNYLDPYGKASMTIMGMVSELELSVIKDRTMSGKIEKARQGIKSPGRVIPYGFDYVDKQFVANEKANIVRMIFDDAAKGYGFTTIAYHLRSKNVPSINDLSWNNVQIKRIITNKIYIGHCCFKIKNKEIVDVLAKNIEPIVSEEIWYAANNLYLAKTQNGKITKYAYDDFIFADVLYCSCCGWKFSSKKSKRVDPKKRPAKYEDRFYRYYKCIHNDTVFENVCSNKKVLNAKKFENYFLQQLNNFIIQPKNEKTVNEKINRLNDIKLLEKSIIELNTKKKRLLDKYLSGIIEDDMYISKNSDIVQEIDYNAKKIEELKSFDDEKEFDLEYLSKLKFVINDIWDVMDNKEKRNFISSTFEKITIDNGEIIKIIFR

SEQ ID NO: 2557 - protein, 490 aa, Artificial Sequence
  Description of Artificial Sequence: Synthetic polypeptide
MYELKYAVYVRVSTDRDEQVSSIENQIDICRYWIEKNGYEWDENSIYKDEAVSGTAWLERHAMQLILEKVRRKELDTVVFKSIHRLGRDLRDALEIKEILLGHGVRLVTIEEGYDSYYEGKNDLKFEMYAMFASQLPKTVSVSVSAALAAKVRRGEYTGGIVPYGYKIVDQKYTINEEEAELVRKMYELYDNGLGYMKIADAINDMGVPSRTGKLWAYPSIRAIITNAAYKGDYIMQKYAEVKVDGRKKMIINPKEKWVVFENHHPAIITRDLWDRVNNSKTDKKTKRRVAIKNELRGLACCAHCRTPLALQQRMYKNKEGETRYYCYLICGRYKRMGARGCVKHSGLQYSDLRLFVLQKLKEKENDLEKVFNLNDTDKHQEKQKKLRKEKKELEIKRERLLDLYLDGGPIDKETFTKRDKNFEKIIKEKELEILKLDDVKTLVVEQQKVKEAFELLEKSEDLYSTFKKLITRIEVSQDGVINIVYRFEE

SEQ ID NO: 2558 - protein, 489 aa, Artificial Sequence
  Description of Artificial Sequence: Synthetic polypeptide
MKKAAAYARVSTKDQSKISIEGQFKTIENFAKQYGFKIVDYFSDKDSGKKMKREQLDVLLENAYKGKYDVILVEKYDRFSRAGIDGQIIIQDLEKNYNVLVIAALEPFDVSTPQGRFTRTIILASYTLEGEMISQRTKMRMKDIASKKYWMGGNPPYGFDSYQIIDEEGKKRRKLKINEEQAKIVREIFELRLKNIGYSEIAKRLNERGIKNARGKLWRGSTILDMINNPLYAGIYIYGKGNKRSRKRSSELKDAVIIENFVDPIIPKEIFEEVNKKNGKLTSALTKNKYLLKGLIYTEFGDRMLGSGGKTPSYVSSAWQYGKTRTYLGISKSKIEREVFLRVKHQLLKLDFNDEEFWEDFAETINYIKKLKINVENDKIAALRKRLEEVEEQLINLTTAIKSGIINDEIKKENEILMKEKNDLINKIKMSNVNIVEETPENLRKKWKEKIEALENYDEDKLIEIYNQLIEQIIVYKDKYIEVKFKQFE

SEQ ID NO: 2559 - protein, 488 aa, Artificial Sequence
  Description of Artificial Sequence: Synthetic polypeptide
MRVLGRIRLSRLSDESTSPERQREIIENWAKANDHVVVGWAEDLDVSGSVDPFDTPALGPWLTEPKLHEWDILCAWKLDRLSRRAIPMNKLFGWVMDHDKTLVCVNDNIDLSTWIGRMIANVIAGVAEGELEAIRERTKSSHRKLRELGRWPGGRPAYGYRAVEREDAAGWELEPDPVSSLILKQIIDWVLQGQSVESIAKDLTDMKEMSPSDYIRQHRTGEAPRGHPWHGRTIVKLLRSKTLLGHVTHQGMTVRDENGVPVLKGPPLIDQETFDRLQAALDAAARPKTVNRTSNASPLLGVAVCMECEGLLHHRRQRTAGKVYRYYHCPHGHTQSIPADDLETLVEERFLGVLGDHEVHERVYFAAESHEQELRQAQEAIDDLTSILAGAKSNTARERVLMQLQALDKRMVELEALPQRAAREEMQPTGEFYKDAWEQADEQGRRALLIRSGITAKAKLVGRVANQSGGALTFDLVVPEDLRERITL

SEQ ID NO: 2560 - protein, 487 aa, Artificial Sequence
  Description of Artificial Sequence: Synthetic polypeptide
MRVLGRIRLSRLSDESTSPERQREIIEGWAKSNDHTIVGWAEDLDVSGSVDPFDTPALGPWLSEPKLHEWDILCAWKLDRLSRRAIPMNKLFGWVMDHDKTLVCVNDNIDLSTWIGRMVANVIAGVAEGELEAIRERTTASHRKLRELGRWPGGRPSYGYRAVEREDAAGWVLEPDPVSSVVLRSIIDWVLQGQSVESIAKDLTAMGEVSPSDYVRQRAGEAPRGHPWHGRTIVKLLRSKTLLGYVTHNGTTVRDENGVPVQKGPPLVDQDTFNRLQAALDDGSRPKTVNRTSKASPLLGVALCWDCEKPLYSRRQTTAGKVYRYYHCRDGHTQSIPADDLQQLVEERFLNALGDQEVHEMVYLPAESHQAELEEAQIAVQELTSALGRMKSNYAQQRIHTQLEALDKRIQELEGLPTSEARSEMRPTGGLYKDAWEEADEQGRRELLIKSGITAKAKLEGRVPNQSGGALSFDLVVPEDLLARMSV

SEQ ID NO: 2561 - protein, 487 aa, Artificial Sequence
  Description of Artificial Sequence: Synthetic polypeptide
MSDYLRSEKPSFSACYRRMVKVAKKNKWTPVPSERALRRRLDAEVPAEVQTLARDGKEKAKTLYPAQRRSRASLHPMQVVNMDGHKLDVFVKVPWSEAPVRMFLLGIQDLYSGKILSWRLSDSENKETVRLVIGDMVENFGIPEAIVLDNGRAFASHWISGGTANRYRFKVKDEDPRGLLTTLGVEVHWTNPFSGQSKPIERAWRDLAENISKHPFCAGAYTGNTTANKPENYGSRAIPLSDFHMHVSEQVAEHNAQAGRRAANCAGRSFDDTFAASIETAIVSQPTAAQKSLWLLASEVIRTQKGNGEIHYQGNRYWNSALTQHAGKKITIRFDPDDLHGSIKVYDLNNSLICDAQCIADTGFFDQDAARNHARARRDYLKGLKATADAQRKLSAKQLGELIYKGEKTRTEEPKPVRPKVTRIARGNLAVKEEAVADAISQEDFERGFARALRGDEPTVIQFPQGMHEPVSSEYGSKKKGGRNPAR

SEQ ID NO: 2562 - protein, 486 aa, Artificial Sequence
  Description of Artificial Sequence: Synthetic polypeptide
MRVLGRVRLSRFSDESTSVERQREIIAKWAADNDHTVVGYAEDVDVSRSVDPFDTPALGPWFTPEQRGEWDIVACWKLDRIATGSIYLNKVMAWCGEHEKSLVSVTENFDLGTWVGRLIANVIAGVAEGELEAIRERTQASRRKLVAVGRWTGGRPTYGYRAVEQDGGGWTLEPDPESSAILRRIVDRALAGESTLSIVRGLNDEGVLSPADYVRYRNGKPTLGAKWTTTATLDLMRSRTLLGQIVHNGAVVRDDSGKPVLGGPPLIDYDTFTRLQAALDARSRTQKVERVDASPLLGVAVCWECGSNLFHQRQMNRGKPYRYYKCPNKCSQAVKADDAEAVVEDMFLDKVGGHDELERVFIPGADHSTELREAQEAVDELTKVLGTMSSNTVRTAVLGQLEALDKRIQELECLPLTEARVELQPTGRLYRDAWGSLDSDGRRELLVKAGITARLKVEGRPVGGRAPGAFYFDLVVPEDLRERMSL

SEQ ID NO: 2563 - protein, 486 aa, Artificial Sequence
  Description of Artificial Sequence: Synthetic polypeptide
MTATLETPPQVVAPPRLRAAVYLRMSTDKELGIDRQREDCVALCERLGWDPVLYVDNDRSAVKENVRREAYEQMCEDIRDGRIDAIITWRSDRLYRKMKSLLPLIDLIQGVNKNGKRIPIETCQTGLIDLTTDAGRMTAKILAAVAENEGEVRTARQMRAYEQIAESGRSLGAPAFGYTNDPKARVREIVPEEAAAIREGYDDVLAGCTLYSIAKKWNDRGLKTPRGNAFVATVVGRILRNPRYAGLYRFRGEIIGEGDWEPIVDVETWAMATAVLDGKNTGPKGPRVRTTLLSGIVRCGHCGNRMSASKNSNGEPIYKCKRYEVCNHGVTRVRKKVDKYVEARIVAKLEERKWVVGTKSDADQAKALHTEAETLRARKASFTDALVDGTLTPAQVKEASDKVDAKLEEIERQLARLTKSRVYDGLLGHDDLEAVWVGLPLDRKRAIIEQLCDKIVIRHVEITGRAAAKLPLGHNIDIYWHKPSDD

SEQ ID NO: 2564 - protein, 486 aa, Artificial Sequence
  Description of Artificial Sequence: Synthetic polypeptide
MTATLETPPQVVAPPRLRAAVYLRMSTDKELGIDRQREDCVALCERLGWDPVLYVDNDRSAVKENVRREAYEQMCEDIRDGRIDAIITWRSDRLYRKMKSLLPLIDLIQGVNKNGKRIPIETCQTGLIDLTTDAGRMTAKILAAVAENEGEVRTARQMRAYEQIAESGRSLGAPAFGYTNDPKARVREIVPEEAAAIREGYDDVLAGCTLYSIAKKWNDRGLKTPRGNAFVATVVGRILRNPRYAGLYRFRGEIIGEGDWEPIVAVETWAMATAVLDGKNTGPKGPRVRTTLLSGIVRCGHCGNRMSASKNSNGEPIYKCKRYEVCNHGVTRVRKKVDKYVEARIVAKLEERKWVVGTKSDADQAKALHTEAETLRARKASFTDALVDGTLTPAQVKEASDKVDAKLEEIERQLARLTKSRVYDGLLGHDDLEAVWVGLPLDRKRAIIEQLCDKIVIRHVEITGRAAAKLPLGHNIDIYWHKPSDD

SEQ ID NO: 2565 - protein, 485 aa, Artificial Sequence
  Description of Artificial Sequence: Synthetic polypeptide
MTKKVAIYTRVSTTNQAEEGFSIDEQIDRLTKYAEAMGWQVSDTYTDAGFSGAKLERPAMQRLINDIENKAFDTVLVYKLDRLSRSVRDTLYLVKDVFTKNKIDFISLNESIDTSSAMGSLFLTILSAINEFERENIKERMTMGKLGRAKSGKSMMWTKTAFGYYHNRKTGILEIVPLQATIVEQIFTDYLSGISLTKLRDKLNESGHIGKDIPWSYRTLRQTLDNPVYCGYIKFKDSLFEGMHKPIIPYETYLKVQKELEERQQQTYERNNNPRPFQAKYMLSGMARCGYCGAPLKIVLGHKRKDGSRTMKYHCANRFPRKTKGITVYNDNKKCDSGTYDLSNLENTVIDNLIGFQENNDSLLKIINGNNQPILDTSSFKKQISQIDKKIQKNSDLYLNDFITMDELKDRTDSLQAEKKLLKAKISENKFNDSTDVFELVKTQLGSIPINELSYDNKKKIVNNLVSKVDVTADNVDIIFKFQLA

SEQ ID NO: 2566 - protein, 485 aa, Artificial Sequence
  Description of Artificial Sequence: Synthetic polypeptide
MVTGLTDYSDCVGYCRVSTQKQFEEGHGLERYIAQLKSWGLNDNQIFWDIESGASDKRKGYNKVLDLIKSGAIKKLIIPCFDRFTRSTLQWEQASLELQKHNVTVIFLDGGSTDLTSPDDLFKMRILAAMSAAVRDKNKFNSSQGHKFRRLNEKAHMACFGYKKSENGDTLVINHDLYKDTNKTYYRVARDIIELFLEKRSLSGTVRSMCSTYMSARLWPRHLDFPHTKSALKDWLTHPMLRGNLVYFRNDPEKELIIPNKFDPILTDGEFYEVASIISQKRKTKYKKDTLVNPLMGLAVCAGCGSFMRVQTSQYVPIKNNPSKKLKKIRYLVCEGAYPRPEKPKICDRRSTFSLKLEDYIDSVISTICLRAETIADLGSIQIDRTVEETAEIKELRQQISKLVGLGDNDLNEIIQIKQTKLNNLLNALKKESAGSEGIYEKLLEYGSKPEFWQCATVDEMYVLFQDLVEKVECDCGEINVILKI

SEQ ID NO: 2567 - protein, 484 aa, Artificial Sequence
  Description of Artificial Sequence: Synthetic polypeptide
MKILKYAVYVRVSTDRDEQVSSVENQIDICRYWLEKNGYEWDPNAVYFDDGISGTAWLERHAMQLILEKARRNELDTVVFKSIHRLARDLRDALEIKEILIGHGIRLVTIEENYDSLYEGGNDIKFEMFAMFAAQLPKTISVSVSAAMQAKARRGEFIGKPGLGYDVIDKKLVINEKEAEIVREIFDLSYKGYGFKKIANILNDKGTYTKFGQLWSHTTVGKILKNQTYKGNLVLNSYKTVKVDGKKKRVYTPKERLTIIEDHYPTIVSKELWNAVNSDRASKKKTKQDTRNEFRGMMFCKHCGEPITAKYSGRYAKGSKKEWVYMKCSNYIRFNRCVNFDPAHYDDIREAIIYGLKQQEKELEIHFNPKMHQKRNDKSTEIKKQIKLLKVKKEKLIDLYVEGLIDKEMFSKRDLNFENEIKEQELALLKLTDQNKRNKEEKKIKEAFSMLDEEKDMHEVFKTLIKKITLSKDKYIDIEYTFSL

SEQ ID NO: 2568 - protein, 484 aa, Artificial Sequence
  Description of Artificial Sequence: Synthetic polypeptide
MKILKYAVYVRVSTDRDEQVSSVENQIDICRYWLEKNGYEWDPNAVYFDDGISGTAWLERHAMQLILEKARRNELDTVVFKSIHRLARDLRDALEIKEILIGHGIRLVTIEENYDSLYEGGNDIKFEMFAMFAAQLPKTISVSVSAAMQAKARRGEFIGKPGLGYDVIDKKLVINEKEAEIVREIFDLSYKGYGFKKIANILNDKGTYTKFGQLWSHTTVGKILKNQTYKGNLVLNSYKTVKVDGKKKRVYTPKERLTIIEDHYPTIVSKELWNAVNSDRASKKKTKQDTRNEFRGMMFCKHCGEPITAKYSGRYAKGSKKEWVYMKCSNYIRFNRCVNFDPAHYDDIREAIIYGLKQQEKELEIHFNPKMHQKRNDKSREIKKQIKLLKVKKEKLIDLYVEGLIDKEMFSKRDLNFENEIKEQELALLKLTDQNKRNKEEKKIKEAFSMLDEEKDMHEVFKTLIKKITLSKDKYIDIEYTFSL

SEQ ID NO: 2569 - protein, 484 aa, Artificial Sequence
  Description of Artificial Sequence: Synthetic polypeptide
MTATLERHLDTPQQEALRVGVYLRMSTDKELGIDRQREDCLALAERLGWVPVEYIDNDRSATKENVKREGFDALSEDIRDGRIDSIITWRSDRLYRKMKDLLPLIDLIQGVNKTGKRIPIETCQTGLIDLTTDAGRMTAKILAAVSENEGEVRTARQMRAYEQIADSGRRLGAPAFGWTHDPRDPQIVPEEAAAIRQAYADVLAGCTLYSIAKKWNEDGLRTTRGNQFVGSVVGKILRSPRNAGLLTFRDEIVGEGTWEPIVDRETWEAACAVLDQKNTGKKGPRVRSTLLSGIVRCGACGNKMAAGKNSNGEPIYKCKRYEVCKHGVTRVRKKVDKYVEMSMVAKLEQRKWIVGTQVDAEQAKGLHAEAEALRARKASFGEALADGTLTPAQVKDATDRVNAKLEEIDAKLARLTRSRVFDGLLGHDDLEKVWLGLDLERKRAIIESLCDKIVIQHVGQTGRSAAKLPLGHAIKIHWHDPSND

SEQ ID NO: 2570 - protein, 484 aa, Artificial Sequence
  Description of Artificial Sequence: Synthetic polypeptide
MTATLERHLDTPQQEALRVGVYLRMSTDKELGIDRQREDCLALAERLGWVPVEYIDNDRSATKENVKREGFDALSDDIRDGRIDSIITWRSDRLYRKMKDLLPLIDLIQGVNKTGKRIPIETCQTGLIDLTTDAGRMTAKILAAVSENEGEVRTARQMRAYEQIADSGRRLGAPAFGWTHDPRDPQIVPEEAAAIREGYADVLAGCTLYSIAKKWSDAGLRTTRGNAFVGSVVGKILRSPRNAGLLTFRDEIVGEGTWEPIVDRETWEAACAVLDQKNTGQKGPRVRSTLLSGIVRCGACGNKMAAGKNSNGEPIYKCKRYEVCKHGVTRVRKKVDKYVEMSMVAKLEQRKWIVGTQVDAEQAKGLHAEAEALRARKASFGEALADGTLTPAQVKDATDRVNAKLEEIDAKLARLTRSRVFDGLLGHDDLEKVWLGLDLERKRAIIESLCDKIVIQHVGQTGRSAAKLPLGHAIKIHWHDPSND

SEQ ID NO: 2571 - protein, 484 aa, Artificial Sequence
  Description of Artificial Sequence: Synthetic polypeptide
MTATLERHLDTPQQEALRVGVYLRMSTDKELGIDRQREDCLALAERLGWVPVEYIDNDRSATKENVKREGFDALSDDIRDGRIDSIITWRSDRLYRKMKDLLPLIDLIQGVNKTGKRIPIETCQTGLIDLTTDAGRMTAKILAAVSENEGEVRTARQMRAYEQIADSGRRLGAPAFGWTHDPRDPQIVPEEAAAIREGYADVLAGCTLYSIAKKWSDAGLRTTRGNAFVGSVVGKILRSPRNAGLLTFRDEIVGEGTWEPIVDRETWEAACAVLDQKNTGQKGPRVRSTLLSGIVRCGACGNKMAAGKNSNGEPIYKCKRYEVCKHGVTRVRKKVDKYVEMSMVAKLEQRKWIVGTQVDAEQAKGLHAEAEALRARKASFGEALADGTLTPAQVKDATDRVNVKLEEIDAKLARLTRSRVFDGLLGHDDLEKVWLGLDLERKRAIIESLCDKIVIQHVGQTGRSAAKLPLGHAIKIHWHDPSND

SEQ ID NO: 2572 - protein, 484 aa, Artificial Sequence
  Description of Artificial Sequence: Synthetic polypeptide
MKKATAYARVSTTEQSKTSIDGQLDTIRNFAKFNDIKIIEEFWDKESGGKMSRPNFDIMIENAFAGKYDLILVEKIDRFAREDIEATLLIKQLEDAGIFVMSVLEPADVTTPSGRFQRWIMLGFGKLEREIIADRTKRRMRDTAKRGYWMGGIPPYGYKTVEVKDNEGRIRKKLEIIEEEAKVIRKIFELHADGKGLSAIAEFLNNNNISTRKGKPWAKTTIYDLLKNKKYIGIYEYGKGTKRNHHSKNSKPLIIENVIPPIIDKELWEKSKKQFRTPVRISMIRNYLLRGKIFCAECGAPLVGNGGKKTMYVCSNWKSRKGDHYVGISKNKIEKHVFLYLKHLLIDNRPNFKQIANTFNYLYKTKKQSKNRKIEYIKNTLEEKYEQRKNIINAIKKGVMIETLTQEAKQIEREIKELNLQLEKLMQNVYFEITEEELEHRWNNLTEMILSDDEDTLKELYDLLIEKIEVASDGYIKIIDKDIL

SEQ ID NO: 2573 - protein, 484 aa, Artificial Sequence
  Description of Artificial Sequence: Synthetic polypeptide
MRNGDITPEEAAELERKGVLKQRDDVKILADRHDREVIFYEDNNLSAFKRNVRRPRFQDMVRDLKAGKLAGMVVYDIDRGFRQPKDLESVIDIYQDFSEKKKVRLIFDTMSGQNFDLSTGDGRFTARLYVNIANKSSEDTSRRIARDNASKARKGVYHGGGPSFGWKEDDRTKLDPKAAGLVRDIVLGHLKGDKIATCMEYLSDKGAVNPTSGKPFTWAGTKTLIFRARNFGIRIYQGEPQLDDEGNYILGDWEPIFTKDDGTPDFDLWERLEALRKGKSPEGSQEKSTVKYLLSRIVRCGRCGYPMVGKTVWVRGTKSQSFAYNCNKSNPDACGKMGVTGPRVDELVKSLVWAQVLRASKNRQVPEPQESWSKEAELKDVEGQIAELKALWEAKEVRAATYVTTLDDLESRRTQLKAERAFHTATPAIRVITPELLKNGWEGLSVERQRIIIRSVLKAVIIHPARDGKKGGPFDPARVEPVFA

SEQ ID NO: 2574 - protein, 484 aa, Artificial Sequence
  Description of Artificial Sequence: Synthetic polypeptide
MEILKYAVYVRVSTDRDEQVSSVENQIDICRYWLEKNGYEWDPNAVYFDDGISGTAWLERHAMQLILEKARRNELDTVVFKSIHRLARDLRDALEIKEILIGHGIRLVTIEENYDSLYEGGNDIKFEMFAMFAAQLPKTISVSVSAAMQAKARRGEFIGKPGLGYDVIDKKLVINEKEAEVVREIFDLSYKGYGFKKIANILNDKGTYTKFGQLWSHTTVGKVLKNQTYKGNLVLNSYKTVKVDGKKKRVYTPKERLTIIEDHYPAIISKELWNAVNSDRASKKKTKQDTRNEFRGLMFCKHCGEPITAKYSGRYAKGSKKEWVYMKCSNYIRFNRCVNFDPVHYDDIREAIIYGLKQQEKELEIHFNPKMHQKRNDKSTEIKKQIKLLKVKKEKLIDLYVEGLIDKEMFSKRDLNFENEIKEQELALLKLTDQNKRNKEEKKIKEAFSMLDEEKDMHEVFKTLIKKITLSKDKYIDIEYTFSL

SEQ ID NO: 2575 - protein, 484 aa, Artificial Sequence
  Description of Artificial Sequence: Synthetic polypeptide
MQTKKVAIYVRVSSLHQAIEGYSIGQQQDALTKYCEAMNWAIYNVYTDAGFSGGKIDRPAMQKLITDAKTGKFDTVLVYKLDRLSRSVQDTLFLVRDIFNENNIGFVSLQENIDTSTAMGNLFLTLLSAIAEFEREQIKERMQMGRYGRAKSGKSMMWNLTSYGYRYNKETQSMDVVPSEALIIKRIYKEYLSGKSISRIKDGLNDEGHVTRDKPWAYKRISHILTSIVYTGVTEFKGEIYEGLHEAIIDKETFELAQAEFKKRQQQTKQNKNNPRPFQAKYMLSGMIRCGYCGAPLKMRKGPVRKDGTRLMAYDCHNRWKRKHTYLTVYNNNEQCTQSGRYLKEDVEGYVINEIKKLQENPDELNKYLKQPEETKVDTKKIESQIKKIDKQIAKLNDLYLNDLITIEDLKSKADKFKSEKNILEAQLKKDENSILKLKAENVRKNLSVKDIDKMTYEEQRNLAKTLIKKVDVTKEDIKIIFDF

SEQ ID NO: 2576 - protein, 484 aa, Artificial Sequence
  Description of Artificial Sequence: Synthetic polypeptide
MNKVAIYVRVSTTMQAEEGYSIDEQIDKLKSYCKIKDWTVYDIYKDGGFSGGNIERPAMERLISDAKRKKFDTVLVYKLDRLSRSQKDTLFLIEEVFDKNDISFLSLNESFDTSTAFGKAMIGILSVFAQLEREQIKERMLLGKIGRAKTGKSMMFSKVSFGYTYDKLKDELVVNQAESIIVRKIFDAYLGGLSLNKLRDYLNNNGIYRGDKPWNYQGLRRILSNPVYIGMIRYREEIYPGNHKAIIDIDDYNKTQEEIKKRQIKALEFSNNPRPFRSKYMLSGIAKCGYCGTPLQIILGSKRKDGTRNMRYQCINRFPRNTKGVTIYNDGKKCESGFYEKADIEEFVINEIRSLQINYNKLDAMFDRHPTVNSDDIKKQIITLDNKLKRLNDLYINNMIELDDLKKQTQSLRKQKTILEDELLNNPAITQEKNKKHFKEMLATKDITKLDYETQKNIVNNLINKVFVKSGYIKIEWKIPFKKA

SEQ ID NO: 2577 - protein, 484 aa, Artificial Sequence
  Description of Artificial Sequence: Synthetic polypeptide
MNKVAIYVRVSTTMQAEEGYSIDEQIDKLTSYCKIKDWTVYDIYKDGGFSGGNIERPAMERLISDAERKKFDTVLVYKLDRLSRSQKDTLFLIEEVFGKNDISFLSLNESFDTSTAFGKAMIGILSVFAQLEREQIKERMLLGKIGRAKTGKAMMFSKVSFGYTYDKLKDELVVNQAESIIVRKIFEAYLGGLSLNKLRDYLNNNGIYRGDKPWNYQGLRRILSNPVYIGMIRYRGEIYPGNHQAIIDIDDYNKTQEEIKKRQITALEFSNNPRPFRAKYMLSGIAKCGYCGTPLRIILGSKRKDGSRNMRYQCINRFPRNTKGVTVYNDGKKCNSGFYEKADVEEFVINQIRDLQFNINKLDNLFDKHPSIDIKSIERQISSLDNKLKRLNDLYLNDMIDLEDLKKQTQLLRQQKTMLEDELLNNPAITQEKNKKYFKEFLATKDITKLDYETQKNIVNNLINKVFVKSGYIKIEWKIPFKKM

SEQ ID NO: 2578 - protein, 484 aa, Artificial Sequence
  Description of Artificial Sequence: Synthetic polypeptide
MNKVAIYVRVSTTMQAEEGYSIDEQIDKLTSYCKIKDWTVYDIYKDGGFSGGNIERPAMERLISDAKRKRFDTVLVYKLDRLSRSQKDTLYLIEEIFGKNDISFLSLNESFDTSTPFGKAMIGILSVFAQLEREQIKERMLLGKIGRAKTGKSMMFSKVSFGYTYDRVKDELIVNQAEAMIVRKIFDEYLGGRSLTKLRDYLNNNQIYRGDKPWNYQGLRRILSNPVYIGMIRYREEIYPGNHQPIIDTDDYNKTQEEIKKRQIEALEFSNNPRPFRAKYMLSGIAKCGYCGTPLQIILGTKRKDGTRNMRYQCINRFPRQTKGITIYNDGKKCNSGFYEKADIEEFVIAEIRGLQLNHNKLDDMFDKHPTIDIEGIEKQITSLDNKLKRLNDLYLNDMIELDDLKKQTQSLRKQKTMLEDELQNNPAIMQEKNKKHFQEMLGTKDITTLDYETQKNIVNNLVNKVFVKSGHIKIEWKIPFKKA

SEQ ID NO: 2579 - protein, 484 aa, Artificial Sequence
  Description of Artificial Sequence: Synthetic polypeptide
MQPKKVAIYVRVSSLHQAIEGYSIGQQQDALTKYCEAMNWAIYNVYTDAGFSGGKIDRPAMQKLITDAKTGKFDTVLVYKLDRLSRSVQDTLFLVRDIFNENNIGFVSLQENIDTSTAMGNLFLTLLSAIAEFEREQIKERMQMGRYGRAKSGKSMMWNLTSYGYRYNKETQSMDVVPSEALIVKRIYKEYLSGKSISRIKDGLNNEGHITRDKPWAYKRISHILTSIVYTGVTEFKGEIYEGLHEAIIDKETFELAQAEFKKRQQQTKQNKNNPRPFQAKYMLSGMIRCGYCGAPLKMRKGPVRKDGTRLMAYDCHNRWKRKHSYLTVYNNNEQCTQSGRYLKEDVEGYVINEIKKLQENPDELNKYLKQPEETKVDTKKIESQIKKIDKQITKLNDLYLNDLITIEDLKSKADKLKSEKNILEVQLKKDENSILKLKAENVRKNLSVKDIDKMTYEEQRNLAKTLIKKVDVTKEDIKIIFDF

SEQ ID NO: 2580 - protein, 484 aa, Artificial Sequence
  Description of Artificial Sequence: Synthetic polypeptide
MMTTNKVAIYVRVSTTNQAEEGYSIEEQKDKLSSYCHIKDWSIYNIYTDGGFSGSNTERPALEKLIKDAKKKKFDTVLVYKLDRLSRSQKDTLYLIEDIFLENKIDFVSLLENFDTSTPFGKAMVGILSVFAQLEREQIKERMQLGKLGRAKSGKSMMWAKTSYGYDYHKETGTVTVNPWQSIIIADIFDWYLSGKSITKIRDALNDMYGEDNGGKVWNYRAVRMILANPVYCGYNQYKGEIYKGNHEPIISEEVFNKTQEELKIRQQLAAEYSNPRPFQAKYMLSGIAQCGYCYAPLKIIMGMVRKDGTRYIRYECYQRHPRKTKGVTVYNNNEKCHSGAYEKDEVEEYVLNEISKLQNDTNYLDELFSNPETESIDRDSYQKQIDELTKKLSRLNDLYIDDRISLEELQKKSAEFTTIRAFLEAELENDPTLKADKQKENMRQTLATDDILGLDYDKQKAIVRTLINKVQVTDEDIAIKWKI

SEQ ID NO: 2581 - protein, 482 aa, Artificial Sequence
  Description of Artificial Sequence: Synthetic polypeptide
MNKKVALYVRVSTLEQAESGYSIGEQIDKLRKYADIKEWHVYDVYEDGGFSGSNTTRPALERLISDAKRHTFDTVLVYKLDRLSRSQKDTLFLIEDIFKANEVDLVSLNENFDTSTAFGTAMIGILSVFAQLEREQIKERMKLGKIGRARSGKAMGWHVTPFGYLYDKQTGNFVVDDLAAGVVKMIFSDYLNGMSITKLRDKLNIAGHIGKDREWSYRTLRQTLDNPTYTGLVKYDGQVFEGNHEAIIDKKTFDAVQNELDIRQKKAYAFNNNPRPFQSKYMLSGIIRCGYCGAPLVSTLGNVRKDGTRLMKYQCTKRIIKKTRTTTVYNDNKKCDSGFYMMRNIESYVVNAVSELQASPELIESMMQSTAKQPKTNIKQLESELAKISSRLKKLSDLYLNDLISIDDLKKQTTDLKENRKRIEDTIDNNKDNNDEKVGMLKLKLTGSDIKERDYQDQSTLVKAFVRKVSVTSDNIEISWNF

SEQ ID NO: 2582 - protein, 482 aa, Artificial Sequence
  Description of Artificial Sequence: Synthetic polypeptide
MMNTINKVAIYVRVSTNVQAEEGYSIDEQIDKLKSYCQIKDWTVYDVYKDGGFSGGNINRPALEKMIIDAKKKRFDTVLVYKLDRLSRSQKDTLFLIEDVFSKNDISFLSLQENFDTSTPFGKALVGLLSVFAQLEREQIKERMQLGMIGRAKSGKPMMFTNVSFGYTYSPKTQQLTINQAEAVIVKQIFNEFLGGMSPLRLMAYLNENNILRNGKEWNYQGIQRILRNPVYIGKIKYNNVIYPGLHEPIIDEESYYKAQKLLDARQDEMRIKGKNRQFKAKYMLSGTAKCGYCGAPLRIKIGNKRLDGTRLKVYQCCNRYPRKYAVVTYNDNKKCNSGNYQKEDLEQYVIAEIRKLQLKPEKIDKLFNKVSKIDTVQINKQIASIDNKINRLNDLYLNDMIDIDKLKSDAEKFKEQKRVLEKELDKDLKIQEQEKNKEDFKKTIGFKDVTKLDYEEQSFIVKSLIDKILVKKGFIKILWKI

SEQ ID NO: 2583 - protein, 481 aa, Artificial Sequence
  Description of Artificial Sequence: Synthetic polypeptide
MITTNKVAIYVRVSTTNQVEEGYSIDEQKDKLSSYCDIKDWNVYKVYTDGGFSGSNTDRPALESLIKDAKKRKFDTVLVYKLDRLSRSQKDTLHLIEDVFIKNGIEFLSLQENFDTSTPFGKAMIGLLSVFAQLEREQIKERMQLGKLGRAKSGKSMMWAKTSYGYDYHKETGTVTINPAQALTIKFIFESYLRGRSITKLRDDLNEKYPKHVPWSYRAVRTILDNPVYCGFNQYKGEIYPGNHEPIISKEEYDKTQSELKIRQRTAAENVNPRPFQAKYILSGIAQCGYCGAPLKIMLGVKRKDGSRLKKYECHQRHPRTLRGVTTYNDNKKCDSGFYYKDKLEASVLKEISKLQDDADYLDKIFSGDNAETIDRESYKKQIEELSKKLSRLNDLYIDDRITLEELQSKSAEFISMRGTLETELENDPALRKNKRKADMRKLLNAEKVFSMDYENQKVLVRRLINKVKVTAEDIVINWKI

SEQ ID NO: 2584 - protein, 481 aa, Artificial Sequence
  Description of Artificial Sequence: Synthetic polypeptide
MKTMNKVAIYVRVSTTNQVEEGYSIDEQKDKLSSYCDIKDWNVYKVYTDGGFSGSNTDRPALESLIKDAKKRKFDTVLVYKLDRLSRSQKDTLHLIEDVFIKNGIEFLSLQENFDTSTPFGKAMIGLLSVFAQLEREQIKERMQLGKLGRAKSGKSMMWAKTSYGYDYHKETGTVTINPAQALTIKFIFESYLRGRSITKLRDDLNEKYPKHVPWSYRAVRTILDNPVYCGFNQYKGEIYPGNHEPIISKEEYDKTQSELKIRQRTAAENVNPRPFQAKYILSGIAQCGYCGAPLKIMLGVKRKDGSRLKKYECHQRHPRTLRGVTTYNDNKKCDSGFYYKDKLEASVLKEISKLQDDADYLDKIFSGDNAETIDRESYKKQIEELSKKLSRLNDLYIDDRITLEELQSKSAEFISMRGTLETELENDPALRKNKRKADMRKLLNAEKVFSMDYENQKVLVRRLINKVKVTAEDIVINWKI

SEQ ID NO: 2585 - protein, 481 aa, Artificial Sequence
  Description of Artificial Sequence: Synthetic polypeptide
MKTMNKVAIYVRVSTTNQVEEGYSIDEQKDKLSSYCDIKDWNVYKVYTDGGFSGSNTDRPALESLIKDAKKRKFDTVLVYKLDRLSRSQKDTLHLIEDVFIKNGIEFLSLQENFDTSTPFGKAMIGLLSVFAQLEREQIKERMQLGKLGRAKSGKSMMWAKTSYGYDYHKETGTVTINPAQALTIKFIFESYLRGRSITKLRDDLNEKYPKHVPWSYRAVRTILDNPVYCGFNQYKGEIYPGNHEPIISKEEYDKTQSELKIRQRTAAENVNPRPFQAKYILSGIAQCGYCGAPLKIMLGVKRKDGSRLKKYECHQRHPRTLRGVTTYNDNKKCDSGFYYKDKLEASVLKEISKLQDDADYLDKIFSGDNAETIDRERYKKQIEELSKKLSRLNDLYIDDRITLEELQSKSAEFISMRATLETELENDPALRKNKRKADMRKLLNAEKVFSMDYEGQKVLVRGLINKVQVTAEDIVIKWKI

SEQ ID NO: 2586 - protein, 481 aa, Artificial Sequence
  Description of Artificial Sequence: Synthetic polypeptide
MITTNKVAIYVRVSTTNQVEEGYSIDEQKDKLSSYCDIKDWNVYKVYTDGGFSGSNTNRPAIEQLIKDAQKKKFDTVLVYKLDRLSRSQKDTLHLIEDVFIKNGIEFLSLQENFDTSTPFGKAMIGLLSVFAQLEREQIKERMQLGKLGRAKAGKSMMWAKTSYGYDYHRETGTITINPAQALTIKFIFESYLRGRSITKLRDDLNEKYPKHVPWSYRAVRTILDNPVYCGFNQYKGEIYPGNHEPIISKEEYDKTQSELKIRQRTAAENVNPRPFQAKYILSGIAQCGYCGAPLKIMLGVKRKDGSRLKKYECHQRHPRTLRGVTTYNDNKKCDSGFYYKDKLEASVLKEISKLQDDADYLDKIFSGDNAETIDRESYKKQIEELSKKLSRLNDLYIDDRITLEELQSKSAEFISMRGTLETELENDPALRKNKRKADMRKLLNAEKVFSMDYENQKVLVRRLINKVKVTAEDIVINWKI

SEQ ID NO: 2587 - protein, 481 aa, Artificial Sequence
  Description of Artificial Sequence: Synthetic polypeptide
MITTNKVAIYVRVSTTNQVEEGYSIDEQKDKLSSYCDIKDWNVYKVYTDGGFSGSNTDRPALESLIKDAKKRKFDTVLVYKLDRLSRSQKDTLHLIEDVFIKNGIEFLSLQENFDTSTPFGKAMIGLLSVFAQLEREQIKERMQLGKLGRAKSGKSMMWAKTSYGYDYHKETGTVTINPAQALTIKFIFESYLRGRSITKLRDDLNEKYPKHVPWSYRAVRTILDNPVYCGFNQYKGEIYPGNHEPIISKEEYDKTQSELKIRQRTAAENVNPRPFQAKYILSGIAQCGYCGAPLKIMLGVKRKDGSRLKKYECHQRHPRTLRGVTTYNDNKKCDSGFYYKDKLEASVLKEISKLQDDADYLDKIFSGDNAETIDRESYKKQIEELSKKLSRLNDLYIDDRITLEELQSKSAEFISMRGTLETELENDPALRKNKRKADMRKLLNAEKVFSMNYENQKVLVRRLINKVKVTAEDIVINWKI

SEQ ID NO: 2588 - protein, 481 aa, Artificial Sequence
  Description of Artificial Sequence: Synthetic polypeptide
MIATNKVAIYVRVSTTSQVEEGYSIDEQKAKLSSYCDIKDWSVYKIYTDGGFSGSNTDRPALEGLIKDAKKRKFDTVLVYKLDRLSRSQKDTLYLIEDIFIKNNIAFLSLQENFDTSTPFGKAMIGLLSVFAQLEREQIKERMQLGKIGRAKAGKSMMWAKTSYGYDYHRETGTITINPAQALAVKFIFESYLRGRSITKLRDDLNEKYPKHVPWSYRAVRTILDNPVYCGFNQYKGEIYPGNHESIISKEEYDKTQSELKIRQRTAAENVNPRPFQAKYILSGIAQCGYCGAPLKIMLGVKRKDGSRLKKYECHQRHPRTLRGVTTYNDNKKCDSGFYYKDKLEAYVLTEISKLQDNAGYLDKIFSGDNAETIDRESYKKQIEELSKKLSRLNDLYIDDRITLEELQSKSAEFISMRGTLETELENDPALRKNKRKADMRKLLNAEKIFSMDYEGQKVLVRGLINKVQVTAEDIVINWKI

SEQ ID NO: 2589 - protein, 481 aa, Artificial Sequence
  Description of Artificial Sequence: Synthetic polypeptide
MNTSGGDRVALYARISQDTSGKAVGVADQLETARKFSADRGYDVVAEHSDNDISAFRGADRPGYQRVLKLARERKIDRVIVYQLTRMTRNRGERAEFIDAFHACKVNVSEAQGGDYDLSTAAGRSWVDIQGALATWESEIKSERVTAAAARRARSGRPSGDLGYGWIKHGTGASATWTEHPHEAEVVREIVDRLLAGETLRGITQSLNDRGEPAPKSASWGKTSVKKLALRESNVALRIHHRGQADEERFDGCWPALVDRAKHEKVGALLREPARQTNGTKRPGARKHLLSWGIGECGVCGGMLRVATKRGRYGRPLDLYVCDANNGCVGRSEPAVDDLVKTVVIKRLSRPDALEWLLGDDDEARRWAERVDELNRRLADAADAFADGAITGEQLRRITAKLQPDLDDALERARESAGALNVDVLRPLAGPEAAQRWDDMEMAQRRAVLEALGLRVIIDRTRPGPGFDPSSVRFVWGRSAD

SEQ ID NO: 2590 - protein, 481 aa, Artificial Sequence
  Description of Artificial Sequence: Synthetic polypeptide
MNTSGGDRVALYARISQDTSGKAVGVADQLETARKFSADRGYDVVAEHSDNDVSAFRGADRPGYQRVLRLARERKIDRVIVYQLTRMTRNRGERAEFIDAFHACKVNVSEAQGGDYDLSTAAGRSWVDIQGALATWESEIKSERVTAAAARRARSGRPSGDLGYGWIKHGTGASATWTEHPHEAEVVREIVDRLLAGETLRGITQSLNDRGEPAPKSASWGKTSVKKLALRESNVALRIHHRGQVDEERFDGCWPALVDRAKHEKVGALLREPARQTNGTKRPGARKHLLSWGIGECGVCGGMLRVATKHGRYGRPLDLYVCDANNGCVGRSEPTVDNLVKTVVIKRLSRPDALEWLLGDDDEARRWAERVDELNRRLADAADAFADGAITGEQLRRITAKLQPDLDDALERARESAGALNVDVLRPLAGPEAAQRWDDMEMSQRRAVLEALGLRVIIDRTRRGPGFDPSSVRFVWGRSAD

SEQ ID NO: 2591 - protein, 481 aa, Artificial Sequence
  Description of Artificial Sequence: Synthetic polypeptide
MKYAVYVRVSTDRDEQVSSVENQIDICRYWLEKNGYEWDPNAVYFDDGISGTAWLERHAMQLILEKARRNELDTVVFKSIHRLARDLRDALEIKEILIGHGIRLVTIEENYDSLYEGGNDIKFEMFAMFAAQLPKTISVSVSAAMQAKARRGEFIGKPGLGYDVIDKKLVINEKEAEIVREIFDLSYKGYGFKKIANILNDKGTYTKFGQLWSHTTVGKILKNQTYKGNLVLNSYKTVKVDGKKKRVYTPKERLTIIEDHYPTIVSKELWNAVNSDRASKKKTKQDTRNEFRGMMFCKHCGEPITAKYSGRYAKGSKKEWVYMKCSNYIRFNRCVNFDPAHYDDIREAIIYGLKQQEKELEIHFNPKMHQKRNDKSTEIKKQIKLLKVKKEKLIDLYVEGLIDKEMFSKRDLNFENEIKEQELALLKLTDQNKRNKEEKKIKEAFSMLDEEKDMHEVFKTLIKKITLSKDKYIDIEYTFSL

SEQ ID NO: 2592 - protein, 481 aa, Artificial Sequence
  Description of Artificial Sequence: Synthetic polypeptide
MEESTSVERQREIIETWARQNDHEIIGWAEDLDVSGSVDPFETPALGPWLTDHRKHEWDILVAWKLDRLSRRAIPMNKLFGWVMENDKTLVCVSENLDLSTWIGRMIANVIAGVAEGELEAIRERTKGSQKKLRELGRWGGGKPYYGYRAQEREDAAGWELVPDEHASAVLLSIIDKVLEGQSTESIARELNERGELSPSDYLRHRAGKPTRGGKWSNAHIRQQLRSKTLLGYSTHNGETIRDERGIAVRKGPALVSQDVFDRLQAALDSRSFKVTNRSAKASPLLGVLICRVCERPMHLRQHHNKQRGKTYRYYQCVGGVEKTHPANLTNADQMEQLVEESFLAELGDRKIQERVYIPAESHRAELDEAVRAVEEITPLLGTVTSDTMRKRLLDQLSALDARISELEKMPESEARWDYREGDETYAEAWNRGDAEERRQLLIKSGITAAAEMKGREARVNPGVLHFDLRIPDDILERMAG

SEQ ID NO: 2593 - protein, 481 aa, Artificial Sequence
  Description of Artificial Sequence: Synthetic polypeptide
MKTMNKVAIYVRVSTTSQVEEGYSIDEQKAKLSSYCDIKDWNVYKVYTDGGFSGSNTDRPALESLIKDAKKRKFDTVLVYKLDRLSRSQKDTLHLIEDVFIKNGIEFLSLQENFDTSTPFGKAMIGLLSVFAQLEREQIKERMQLGKLGRAKSGKSMMWAKTSYGYDYHKETGTVTINPAQALTIKFIFESYLRGRSITKLRDDLNEKYPKHVPWSYRAVRTILDNPVYCGFNQYKGEIYPGNHEPIISKEEYDKTQSELKIRQRTAAENVNPRPFQAKYILSGIAQCGYCGAPLKIMLGVKRKDGSRLKKYECHQRHPRTLRGVTTYNDNKKCDSGFYYKDKLEASVLKEISKLQDDADYLDKIFSGDNAETIDRESYKKQIEELSKKLSRLNDLYIDDRITLEELQSKSAEFISMRGTLETELENDPALRKNKRKADMRKLLNAEKVFSMDYENQKVLVRRLINKVKVTAEDIVINWKI

SEQ ID NO: 2594 - protein, 481 aa, Artificial Sequence
  Description of Artificial Sequence: Synthetic polypeptide
MITTNKVAIYVRVSTTNQVEEGYSIDEQKDKLSSYCDIKDWNVYKVYTDGGFSGSNTDRPALESLIKDAKKRKFDTVLVYKLDRLSRSQKDTLHLIEDVFIKNGIEFLSLQENFDTSTPFGKAMIGLLSVFAQLEREQIKERMQLGKLGRAKSGKSMMWAKTSYGYDYHKETGTVTINPAQALTIKFIFESYLRGRSITKLRDDLNEKYPKHVPWSYRAVRTILDNPVYCGFNQYKGEIYPGNHEPIISKEEYDKTQSELKIRQRTAAENVNPRPFQAKYILSGIAQCGYCGAPLKIMLGVKRKDGSRLKKYECHQRHPRTLRGVTTYNDNKKCDSGFYYKDKLEAYVLKEISKLQDDADYLDKIFSGDNAETIDRESYKKQIEELSKKLSRLNDLYIDDRITLEELQSKSAEFISMRGTLETELENDPALRKNKRKADMRKLLNAEKVFSMDYESQKVLVRRLINKVKVTAEDIVINWKI

SEQ ID NO: 2595 - protein, 481 aa, Artificial Sequence
  Description of Artificial Sequence: Synthetic polypeptide
MKTMNKVAIYVRVSTTNQVEEGYSIDEQKDKLSSYCDIKDWNVYKVYTDGGFSGSNTDRPALESLIKDAKKRKFDTVLVYKLDRLSRSQKDTLHLIEDVFIKNGIEFLSLQENFDTSTPFGKAMIGLLSVFAQLEREQIKERMQLGKIGRAKAGKSMMWAKTSYGYDYHRETGTITINPAQALTIKFIFESYLRGRSITKLRDDLNEKYPKHVPWSYRAVRTILDNPVYCGFNQYKGEIYPGNHESIISKEEYDKTQSELKIRQRTAAENVNPRPFQAKYILSGIAQCGYCGAPLKIMLGVKRKDGSRLKKYECHQRHPRTLRGVTTYNDNKKCDSGFYYKDKLEAYVLTEISKLQDNAGYLDKIFSGDNAETIDRESYKKQIEELSKKLSRLNDLYIDDRITLEELQSKSAEFISMRGTLETELENDPALRKNKRKADMRKLLNAEKIFSMDYEGQKVLVRGLINKVQVTAEDIVINWKI

SEQ ID NO: 2596 - protein, 481 aa, Artificial Sequence
  Description of Artificial Sequence: Synthetic polypeptide
MKYAVYVRVSTDRDEQVSSVENQIDICRYWLEKNGYEWDPNAVYFDDGISGTAWLERHAMQLILEKARRNELDTVVFKSIHRLARDLRDALEIKEILIGHGIRLVTIEENYDSLYEGGNDIKFEMFAMFAAQLPKTISVSVSAAMQAKARRGEFIGKPGLGYDVIDKKLVINEKEAEIVREIFDLSYKGYGFKKIANILNDKGTYTKFGQLWSHTTVGKILKNQTYKGNLVLNSYKTVKVDGKKKRVYTPKERLTIIEDHYPAIVSKELWNAVNSDRASKKKTKQDTRNEFRGMMFCKHCGEPITAKYSGRYAKGSKKEWVYMKCSNYIRFNRCVNFDPVHYDDIREAIIYGLKKQEKELEIHFNPKMHQKRNDKSTEIKKQIKLLKVKKEKLIDLYVEGLIDKEMFSKRDLNFENEIKEQELALLKLTDQNKRNKEEKKIKEAFSMLDEEKDMHEVFKTLIKKITLSKNKYIDIEYTFSL

SEQ ID NO: 2597 - protein, 481 aa, Artificial Sequence
  Description of Artificial Sequence: Synthetic polypeptide
MEESTSVERQREIIETWARQNDHEIIGWAEDLDVSGSVDPFETPALGPWLTDHRKHEWDILVAWKLDRLSRRAIPMNKLFGWVMENDKTLVCVSENLDLSTWIGRMIANVIAGVAEGELEAIRERTKGSQKKLRELGRWGGGKPYYGYRAQEREDAAGWELVPDEHASAVLLSIIEKVLEGQSTESIARELNERGELSPSDYLRHRAGKPTRGGKWSNAHIRQQLRSKTLLGYSTHNGETIRDERGIAVRKGPALVSQDVFDRLQAALDSRSFKVTNRSAKASPLLGVLVCRVCERPMHLRQHHNKKRGKTYRYYQCVGGVEKTHPANLTNADQMEQLVEESFLAELGDRKIQERVYIPAESHRAELDEAVRAVEEITPLLGTVTSDTMRKRLLDQLSALDARISELEKLPESEARWEYREGDETYAEAWNRGDAEARRQLLLKSGITAAAEMKGREARVNPGVLHFDLRIPDDILERMSA

SEQ ID NO: 2598 - protein, 481 aa, Artificial Sequence
  Description of Artificial Sequence: Synthetic polypeptide
MITTNKVAIYVRVSTTSQVEEGYSIDEQKAKLSSYCDIKDWSVYKIYTDGGFSGSNTDRPALEGLIKDAKKRKFDTVLVYKLDRLSRSQKDTLYLIEDIFIKNNIAFLSLQENFDTSTPFGKAMIGLLSVFAQLEREQIKERMQLGKIGRAKAGKSMMWAKTSYGYDYHRETGTITINPAQALAVKFIFESYLRGRSITKLRDDLNEKYPKHVPWSYRAVRTILDNPVYCGFNQYKGEIYPGNHESIISKEEYDKTQSELKIRQRTAAENVNPRPFQAKYILSGIAQCGYCGAPLKIMLGVKRKDGSRLKKYECHQRHPRTLRGVTTYNDNKKCDSGFYYKDKLEAYVLTEISKLQDNAGYLDKIFSGDNAETIDRESYKKQIEELSKKLSRLNDLYIDDRITLEELQSKSAEFISMRGTLETELENDPALRKNKRKADMRKLLNAEKIFSMDYEGQKVLVRGLINKVQVTAEDIVINWKI

SEQ ID NO: 2599 - protein, 481 aa, Artificial Sequence
  Description of Artificial Sequence: Synthetic polypeptide
MKTTNKVAIYVRVSTTSQVEEGYSIEEQKDKLESYCKIKDWSVYKVYTDGGFSGSNTDRPALESLIKDAKKRKFDTVLVYKLDRLSRSQKDTLHLIEDVFIKNGIEFLSLQENFDTSTPFGKAMIGLLSVFAQLEREQIKERMQLGKIGRAKAGKSMMWAKTSYGYDYHRETGTITINPAQALAIKFIFESYLRGRSITKLRDDLNEKYPKHVPWSYRAVRTILDNPVYCGFNQYKGEIYPGNHEPIISKEEYDKTQSELKIRQRTAAENVNPRPFQAKYILSGIAQCGYCGAPLKIMLGVKRKDGSRLKKYECHQRHPRTLRGVTTYNDNKKCDSGFYYKDKLEAYVLTEISKLQDNAGYLDKIFSGDNAETIDRESYKKQIEELSKKLSRLNDLYIDDRITLEELQSKSAEFISMRGTLETELENDPALRKNKRKADMRKLLNAEKIFSMDYEGQKVLVRGLINKVQVTAEDIVINWKI

SEQ ID NO: 2600 - protein, 481 aa, Artificial Sequence
  Description of Artificial Sequence: Synthetic polypeptide
MIATNKVAIYVRVSTTNQVEEGYSIDEQKDKLSSYCDIKDWNVYKVYTDGGFSGSNTDRPALESLIKDAKKRKFDTVLVYKLDRLSRSQKDTLHLIEDVFIKNGIEFLSLQENFDTSTPFGKAMIGLLSVFAQLEREQIKERMQLGKLGRVKSGKSMMWAKTSYGYDYHKETGTVTINPAQALTIKFIFESYLRGRSITKLRDDLNEKYPKHVPWSYRAVRTILDNPVYCGFNQYKGEIYPGNHEPIISKEEYDKTQSELKIRQRTAAENVNPRPFQAKYILSGIAQCGYCGAPLKIMLGVKRKDGSRLKKYECHQRHPRTLRGVTTYNDNKKCDSGFYYKDKLEAYVLKEISKLQDDADYLDKIFSGDNAETIDRESYKKQIEELSKKLSRLNDLYIDDRITLEELQSKSAEFISMRGTLETELENDPALRKNKRKADMRKLLNAEKVFSMDYENQKVLVRRLINKVKVTAEDIVINWKI

SEQ ID NO: 2601 - protein, 481 aa, Artificial Sequence
  Description of Artificial Sequence: Synthetic polypeptide
MNTSGGDRVALYARISQDTSGKAVGVADQLETARKFSADRGYDVVAEHSDNDISAFRGADRPGYQRVLKLARERKIDRVIVYQLTRMTRNRGERAEFIDAFHACKVNVSEAQGGDYDLSTAAGRSWVDIQGALATWESEIKSERVTAAAARRARSGRPSGDLGYGWIKHGTGASATWTEHPHEAEVVREIVDRLLAGETLRGITQSLNDRGEPAPKSASWGKTSVKKLALRESNVALRIHHRGQADEERFDGCWPALVDRAKHEKVGALLREPARQTNGTKRPGARKHLLSWGIGECGVCGGMLRVATKRGRYGRPLDLYVCDANNGCVGRSEPAVDNLVKTVVIKRLSRPDALEWLLGDDDEARRWAERVDELNRRLADAADAFADGAITGEQLRRITAKLQPDLDDALERARESAGALNVDVLRPLAGPEAAQRWDGMEMSQRRAVLEALGLRVIIDRTRRGPGFDPSSVRFVWGRSAD

SEQ ID NO: 2602 - protein, 481 aa, Artificial Sequence
  Description of Artificial Sequence: Synthetic polypeptide
MITTNKVAIYVRVSTTNQAEEGYSIEEQKDKLKSYCNIKDWNVFNVYTDGGFSGSNTERPALEQLIKDAKKKKFDTVLVYKLDRLSRSQKDTLYLIEDIFLENNIDFVSLLENFDTSTPFGKAMVGILSVFAQLEREQIKERMQLGKLGRAKAGKSMMWAKVAYGYTYHKGSGEMTINELEAIVVREIFNSYLEGMSITKLRDKINDTYPKTPAWSYRIIRQILDNPVYCGYNQYKGEVYKGNHEPIISEEDFNKTQDELKIRQRTAAEKFNPRPFQAKYMLSGIAQCGYCKAPLKIIMGAVRKDGTRFIKYECYQRHPRTTRGVTTYNNNQKCHSSSYYKQDVEDYVLREISKLQNDKKAIDELFENTNMDTIDRESIKKQIEAISSKIKRLNDLYIDDRITIDELRKKSTEFTLSKTFLKEKLENDPILKQQESKDNIKKILSCDDILTMDYDQQKIIVKGLINKVQVTADKVIIKWKI

SEQ ID NO: 2603 - protein, 481 aa, Artificial Sequence
  Description of Artificial Sequence: Synthetic polypeptide
MNAINKVAIYVRVSTNVQAEEGYSIDEQIDKLKSYCQIKDWTVYDVYKDGGFSGGNINRPALEKMIIDAKKKRFDTVLVYKLDRLSRSQKDTLFLIEDVFSKNDISFLSLQENFDTSTPFGKALVGLLSVFAQLEREQIKERMQLGMIGRAKSGKPMMFTNVSFGYTYSPKTQQLTINQAEAVIVKQIFNEFLGGMSPLRLMAYLNENNILRNGKEWNYQGIQRILRNPVYIGKIKYNNVIYPGLHEPIIDEESYYKAQKLLDARQDEMRIKGKNRQFKAKYMLSGTAKCGYCGAPLRIKIGNKRLDGTRLKVYQCCNRYPRKYAVVTYNDNKKCNSGNYQKEDLEQYVIAEIRKLQLKPEKIDKLFNKVSKIDTVQINKQIASIDNKINRLNDLYLNDMIDIDKLKADAEKFKEQKRVLEKELDKDLKIQEQEKNKEDFKKTIGFKDVTKLDYEEQSFIVKSLIDKILVKKGFIKILWKI

SEQ ID NO: 2604 - protein, 481 aa, Artificial Sequence
  Description of Artificial Sequence: Synthetic polypeptide
MITTNKVAIYVRVSTTSQAEEGYSIEEQKAKLSSYCDIKDWSVYKIYTDGGFSGSNTDRPALEGLIKDAKKRKFDTVLVYKLDRLSRSQKDTLYLIEDVFIKNNIAFLSLQENFDTSTPFGKAMIGLLSVFAQLEREQIKERMQLGKIGRAKAGKSMMWAKTSYGYDYHRETGTITINPAQALAVKFIFESYLRGRSITKLRDDLNEKYPKHVPWSYRAVRTILDNPVYCGFNQYKGEIYPGNHEPIISKEEYDKTQSELKIRQRTAAENVNPRPFQAKYILSGIAQCGYCGAPLKIMLGVKRKDGSRLKKYECHQRHPRTLRGVTTYNDNKKCDSGFYYKDKLEAYVLEEISKLQDDADFLDKIFSGDNAETIDRESYKKQIEELSKKLSRLNDLYIDDRITLEELQSKSAEFISMRATLETELENDPALRKNKRKADMRKLLNAEKVFSMDYESQKVLVRGLINKVQVTAEDIVIKWKI

SEQ ID NO: 2605 - protein, 481 aa, Artificial Sequence
  Description of Artificial Sequence: Synthetic polypeptide
MITTNKVAIYVRVSTTNQAEEGYSIEEQKDKLKSYCNIKDWNVFNVYTDGGFSGSNTERPALEQLIKDAKKKKFDTVLVYKLDRLSRSQKDTLYLIEDIFLENNIDFVSLLENFDTSTPFGKAMVGILSVFAQLEREQIKERMQLGKLGRAKAGKSMMWAKVAYGYTYHKGSGEMTINELEAIVVREIFNSYLEGMSITKLRDKINDTYPKTPAWSYRIIRQILDNPVYCGYNQYKGEVYKGNHEPIISEEDFNKTQDELKIRQRTAAEKFNPRPFQAKYMLSGIAQCGYCKAPLKIIMGAVRKDGTRFIKYECYQRHPRTTRGVTTYNNNQKCHSSSYYKQDVEDYVLREISKLQNDKKAIDELFENTNMDTIDRESIKKQIEAISSKIKRLNDLYIDDRITIDELRKKSTEFTLSKTFLEEKLENDPILKQQESKDNIKKILSCDDILTMDYDQQKIIVKGLINKVQVTADKVIIKWKI

SEQ ID NO: 2606 - protein, 480 aa, Artificial Sequence
  Description of Artificial Sequence: Synthetic polypeptide
MRTALYIRVSTEDQAREGYSIQMQKEKLHAYCVSQGWDIEGFYIDDGYSAKDLDRPAMKRMIENIQQGLIDCVLVYRLDRLTRSVLDLHNLLKLFDEHDCKFKSATEVYDTTTATGRMFITFVAALAQWERENTAERVKANMQQMVHEGKYPGGKVNFGYRLEGKKIVIDEQEAAVVRKMFDLYLEGNGDNRTATLLNRMGHRTRQGRLWTGKQVRDVLTNQVYIGRFFYMDEYHDGIIPPIIEREKFETAQKMREGRRGKHPRQVASDYIFSGVLRCARCGRVMPGKLSNHTKKNGVYARRKYTCRGTFTKLCDMPMLDEQAIEEVFLQYIREIRDASAASEVAASYEQDSDHISRQIQDIETQLDEIKKRRKRLQLAFANEVISLEELKELTSEDRKIEKELQNKLEELKEQEESSEVSPQELIEILMQFGENWNHLSDKEKKNLISMFIKEIYVQAENTRPNRWRKRKVWIERVEFL

SEQ ID NO: 2607 - protein, 480 aa, Artificial Sequence
  Description of Artificial Sequence: Synthetic polypeptide
MKYAVYVRVSTDRDEQVSSVENQIDICRYWLEKNGYEWDPNAVYFDDGISGTAWLERHAMQLILEKARRNELDTVVFKSIHRLARDLRDALEIKEILIGHGIRLVTIEENYDSLYEGGNDIKFEMFAMFAAQLPKTISVSVSAAMQAKARRGEFIGKPGLGYDVIDKKLVINEKEAEVVREIFDLSYKGYGFKKIANILNDKGTYTKFGQLWSHTTVGKVLKNQTYKGNLVLNSYKTVKVDGKKKRVYTPKERLTIIEDHYPAIVSKELWNAVNRDRASKKKTKQDTRNEFRGMMFCKHCGEPITAKYSGRYAKGSKKEWVYMKCSNYIRFNRCVNFDPVHYDDIREAIIYGLKQQEKQLEIHFNPKMHQKRNDKSTEIKKQIKLLKVKKEKLIDLYVEGLIDKEMFSKRDLNFENEIKEQELELLKLTDQNKRNKEEKKIKEAFSMLDEEDMHEVFKTLIKKITLSKDKYIDIEYTFSL

SEQ ID NO: 2608 - protein, 480 aa, Artificial Sequence
  Description of Artificial Sequence: Synthetic polypeptide
MTMHKVAIYVRVSTTSQADEGYSIDEQKAKLTSYCDIKDWNIYEIYTDGGFSGSNTERPALEQLIRDAKRKLFDTVLVYKLDRLSRSQKDTLYLIEDVFLENDIEFVSLLENFDTSTPFGKAMIGLLSVFAQLEREQIKERMQLGKLGRAKSGKSMQWAKTSYGYDYIKETGTLSVNQYQALIVRKMFKWYLSGMSITKLRDALNEQYGQDKEWSYRTVRAILSNPVYCGYNQFKGQIFPGTHEPIISEEDFNKTQEEIKTRQRTAAQRFNPRPFQAKYMLSGIAQCGYCSAPLAIKLGMIRKDGTRLIKYECKQRHPRKTKGVTVYNNNEKCDSGFYFKDDIEHFVLTEISKLQTDSDYIDKLFSNTDKETIDRDSYQKQIDNLTAKISRLNDLYIDDRISLEELQKRSSDFMAERSALEKELDADNSIKTVERKKDIKRVLDTKDVLTLDYEQQKAIARALISKVRVTSETIVILWKL

SEQ ID NO: 2609 - protein, 479 aa, Artificial Sequence
  Description of Artificial Sequence: Synthetic polypeptide
MNKVAIYVRVSTTSQAEEGYSIDEQIDKLSSYCKIKDWTVYDVYKDGGFSGGNIERPAMERLISDAKRKRFDTVLVYKLDRLSRSQKDTLFLIEEVFIKNNISFLSLNESFDTSTPFGKAMIGILSVFAQLEREQIKERLMLGKVGRAKSGKPMMFSSISFGYTYDKHAKELHINQAEAVIVKKIFSEYLSGRSLTNLRDYLNDNGFTRNGRYWDYQGLKRIMKNPVYIGMIRYNGVIYPGNHQAIIDAETFDKTQIELKKRQLQAAELQNNPRPFRAKYMLSGLLRCGYCSAPLTVVLSGKTKSGSRNIFYECYNRHPKIKKGRTIYNDGKKCNSGTYNKSYLEECILNEIRLLQLNPERIDDIYDVQPTIDVDSIENQIATLNKKLDKLNDLYLNDMVSMDVLKKQTHTLRQQKKILEHELENNNVEIIKNSKRIFIETLNISDVTKLDYNIQKNIANTLIKEIVVKNGEITIQWRI

SEQ ID NO: 2610 - protein, 479 aa, Artificial Sequence
  Description of Artificial Sequence: Synthetic polypeptide
MAKVAIYTRVSTTLQADEGYSLEEQINKLKSYCDIKDWTVYKVYSDGGFTGSNIERPAMTNLVSDAKAKKFDTVLVYKLDRLSRSQKDTLYLIEEVFIKNDINFLSLNENFDTSSAFGKAMIGILSVFAQLEREQIKERMMLGKVGRAKSGKSMMWGKSSYGYEYHKKNGSMEIVPGEAIIVKKIFELYVSGKSITKLRDYLNENNLLTNKKVKWSYQATRGILTNPVYCGLIRYDGQIYPGLHEPIISKEMFDLTQEIIKERQMTALTNCNPRPFKAKYMLSGIGRCGYCGAPLKIMLGRIRNDGTRTIRYDCTNRFPRKTKPITVYNDYKKCNSGYYYKDDVEKVVLDRIYSLQLDNADTDKIFGKDEIIDNSKIEKEIKQINLKIEKLNDLYLNDLISLEELKSKTTNLINQKKLLEDEITDRQKKKENPLKKQAIKTISNKNIYELSYEDQALIVKSLINRIYVKENEIQIEWKN

SEQ ID NO: 2611 - protein, 479 aa, Artificial Sequence
  Description of Artificial Sequence: Synthetic polypeptide
MKAALYIRVSTQEQAIEGYSISSQRQKLTAYSYSQGWEIVDYYVDEGKSAKDLDRPELKRMLDDIKQHKIDVVLVYRLDRITRSVMDLYELLGIFDKYHCKFKSATEVYDTTSATGRLFITLVASMAQWERETIAERVSMGMAEKVRQGEWHGSEAPYGFYYNIETKELVIDESEAHVVRDIFTKYLDGLSDRKIAIYLNEKKVPTRKGARWRENRIRYILTNPIYIGNLRWGVRVNREQAFQVENAVPAIIDKETFEKAQMIRNSRRRFHGRQATSDFIFSGVLKCARCGSPMKGHTHKCKNKRNKSYRCIKVLFNECDMPLISERIIEYQFLKAVKELIFKEIKIETKSSDQHIDKEKIIKNLQTELNKIEERRKKWQYAWVNEMIDDNQFKDRMNEELIKEQEIKRKLEDINVEIEEFEMDNELKELMSDALENWIRLDDHEKKQLIQIAINKIIVEKIPSNKVLERAKILEIEFN

SEQ ID NO: 2612 - protein, 479 aa, Artificial Sequence
  Description of Artificial Sequence: Synthetic polypeptide
MERQREFIETWARQNDHEIVGWAEDLDVSGSVDPFDTQGLGPWLKEPKLREWDILCAWKLDRLARRAVPLHKLFGMCQDEQKVLVCVSDNIDLSTWVGRLVASVIAGVAEGELEAIRERTLSSQRKLRELGRWAGGKPAYGFKAQEREGSAGYELVHDEHAANVMLGVIEKVLAGQSTESVARELNEAGELAPSDYIRARAGRKTRGTKWSNAQIRQLLKSKTLLGHVTHNGSTVRDDDGIPIRKGPALISEEKFDQLQAALDARSFKVTNRSAKASPLLGVAICGLCGRPMHIRQHRRNGNLYRYYRCDSGSHSGGGGAAPEHPSNIIKADDLEALVEEHFLDEVGGFNVQEKVYVPASDHRAELDEAVRAVEELTQLLGTMTSATMKSRLMSQLTALDERIARLENLPSEEARWDYRATDQTYAEAWEEADTEGRRQLLIRSGITAEVKVTGGDRGVRGVLEFHLKVPEDVRERLSA

SEQ ID NO: 2613 - protein, 479 aa, Artificial Sequence
  Description of Artificial Sequence: Synthetic polypeptide
MNKVAIYVRVSTKGQADEGYSIDEQIALLTSYCSIHKWKIYDTYVDAGVSGATIERPELSRLSRDAKKKKFNTMIVYDLKRLGRSQRNNIAFIEDVLEKNGIGFISLTENFDTSSPLGKAMVGILSAFGQLDRDTIRERMMMGKIGRAKAGKPMMTSTIAFGYTYDRVTSSLNINQAEAIIVKTIYNEYILGRSLTKLRDYLNENGLLRNGKPWSYQGVSRILRNPVYKGMNRFRGEVYQGTHEPIISAELFDRTQKELKKRQIEAYKRNNNRRPFRAKYMLSGIIRCGVCGSPMEITLGFKRNDGTRNMRYQCINRFPRQTKGITVYNDAQKCDTGLYEKSDIEIHVLSQVRLLQLNKAKLESMFERTDVINVEDIQNQIETLNNKMRRLNDLYLNDMIDLDDLRSQTQNFLKQKELLENELENNPALNQEQDKEQFKELLGTKDITQLDYDKQKLIIKNLIDKVFVKPGNIEIKWRI

SEQ ID NO: 2614 - protein, 479 aa, Artificial Sequence
  Description of Artificial Sequence: Synthetic polypeptide
MNKVAIYVRVSTKGQAEEGYSIDEQIALLTSYCSIHKWKIHDTYVDAGISGATIERPELSRLSRDAQKKKFNTMIVYDLKRLGRSQRNNISFIEDVLEKNGIGFISLTENFDTSTPLGKAMVGILSAFGQLDRDTIRERMMMGKIGRAKSGKPMMTSTIAFGYTYDKVTSSLNINPAEAIVVKIIYNEYLSGRSLTKLRDYLNENDLLRNGKPWNYQGVSRVLRNPVYMGMVRFRGEVYQGNHDPIIDSETFEAVQKELKKRQLETYEFNKNTRPFRAKYMLSGIIKCGYCGSPMGVTLGTKRKDGTRNIRYQCVNRFPRTTKGITVYNNGQKCNSGFYEKDDIEIYVLGQVRLLQLNKTKLNKMFETPEIINVEEIENQINSLNNKMKRLNDLYLNDMISLDELKTQTYTFLKQKDLLENELNNNPAIHQEENRKQFQKLLGTKDITQLSYEEQSFAIKNLIDKVFVKPGIIDINWRI

SEQ ID NO: 2615 - protein, 479 aa, Artificial Sequence
  Description of Artificial Sequence: Synthetic polypeptide
MKTAVYIRVSTDEQVNEGYSISAQKQKLKAFCVSQGWDVVGLYADEGISAKDTNRPYLQRMIQDIKNGEIECVLVYRLDRLTRSVFDLYKLLEVFEQHDCKFKSATEVYDTTTAMGRMFITIVAALAQWERENMGERISFGFGEKIRQGKYPLNFAPLGYDLSKEESKLYINEKEAATVRIVYNLYQSGMGFGKVAKELNAQEIYTKDRNKWTDNTTMKTIRNPIYYGSMRWNGLIYKLKHEPILTYEEWSNTQEIIKARTSQTPRSVSSRYIFSGKLKCNGCGGPMQGYYTTSKAAGGGVNQYPQYRCRNKRNGKCSKSRSLSETKLEKAFLEYLENENYLDLYEKTADKGEKELNKKEPEVDIQQLKNNLNRIENRKKKWQYAWAEDAMSFNDFKRRMDEAQKEEDEIKEKIESAEVETEEPFSKNDIIKILKDIEQNWIMLNVQEKKNLVNSIIEEVRYDQTGKTVTIDRINFKKD

SEQ ID NO: 2616 - protein, 478 aa, Artificial Sequence
  Description of Artificial Sequence: Synthetic polypeptide
MRVCKYRRVSTDMQREEGVSLSTQDERLDAFIKSQGWTVVADYADEGFSAKNMDRPAIQQLIQDLKRDKFDVVLVYRLDRLVRSVSDLHELLQIMDKHDVKFKSCTEVFDTTSATGRMFITIIATLAQWERETIAERVFDNMLARSEKGMRNGAPAPYGYIYKDGSLELVKEEAKWVKFIFDKYKTTGSQNIAKTLNKRGIKTRKGEVWSDFSIRYLLRNPIYAGYVRWNYRSLAKGKCTGDEVIQKIDQDNFQAIITKEEFDEIQILIKERSTVAFRSDNFYPYSGVAKCAKCGNSLTGAFKNKKSGGIYRFYKCAGRFRTGICDAPVISEEAIDIALMKCLDLPEFDLKYEEQNKIDREQLEKELTKIELKKSRIKELYLDGDISKNEYRKRMDSLIDDEIRIQKKLEIEEIEATYEEVLEWMSLIKESWNELSFETRKAAIRTIFSSLTVKIIKDPVFGRYPQLPVVEITNYKLK

SEQ ID NO: 2617 - protein, 478 aa, Artificial Sequence
  Description of Artificial Sequence: Synthetic polypeptide
MNKVAIYVRVSTTNQAEEGYSIEEQIDKLKAYCMIKDWSVYDIYVDAGFSGSNIKRPAIQKLIKDTKRKVFDTVLVYKLDRLSRSQKDTLYLIEDVFLENKIDFVSLLENFDTSTAFGKAMVGILSVFAQLDREQIKERMQLGKLGRAKSGKPMMWAKVAYGYTYHIGTGKMTVNQSEAIIVKEVFSSYLNGRSITKLRDDLNEKYPKTPAWSYRTIRQMLDNPVYCGYNKYKGQVYPGNHAPIISKEIYNQVQDELKIRQQKAYEHNNNYRPFQSKYMLSGIAQCGYCKAPLKITLGTIRKDGTRFKRYQCVQRTPRKTKGATVYNNNEKCNSGFYEKDDIEAYVLESISKLQTDSNCIDELFNDEPEKLDRDALNKEIETLSNKISRLNDLYINNLITLDDLKTKTDTLQSKIDILKEKLEKDPALERQKNKQKMLKKLDTKDIFKMDYEEQKMLVRALINKVQVTADSIKILWKI

SEQ ID NO: 2618 - protein, 478 aa, Artificial Sequence
  Description of Artificial Sequence: Synthetic polypeptide
MNKVAIYVRVSTTNQADEGYSIDEQIDKLKAYCEIKDWVVYKVFTDAGFTGSNIERPAMTKLISAAKKKQFDTILVYKLDRLSRSQKDTLYLIEEIFIKNGIDFLSLSENFDTSSAFGKAMIGILSVFAQLEREQIKERMMLGKVGRAKSGKTMMWAHPAYGYTYNKETSSLDIVPAEAALIKKIYELYIKGKSISKLRDYLNDNKIFVNKSVPWSHRTISYALTNPVYCGMIRYEGKLYDGLHEPIITKELFNKTQEVLAERRMEASKKNPRPFQSKYMLSGIIRCGCCNAPMKSLLGMPRKDGTRTRRYQCINRFPRKTKPVTVYNDNKKCDSGYYYMEDVEHAVLHRISTLYSDEIEASEFFEDEITFDIQKVKDEITKIESKINKLNDLYINDFISLDSLKKQSANLINEKKIIENEIEKENSKQVNNLKEDALKILATNNIHDLDYEMQSYVVKSLIDKVFVTKEDMEILFKK

SEQ ID NO: 2619 - protein, 478 aa, Artificial Sequence
  Description of Artificial Sequence: Synthetic polypeptide
MKTTNKVAIYVRVSTTSQAEEGYSIDEQLFSLRKYCEAMNWQVYHEYVDAGFSGGKLDRPEITQLIQDAKNKLFDTILVYKLDRLSRSVPDTLYLVRDVFGKRDIGFVSLQENIDTSSAMGNLFITLLSAIAEFEREQITERMEMGKLGRAKSGKTMAWRVTAFGYDYNKETGNLELDPVKAPLVKMVFDEYMQGTSIDNIADKMNSLDYTGKDRPWAHHGVASLLDNPVYYGMNRYKDKIYKGNHEPVITKELFDLVQKERERRRQGTPESHNTPPWQRKYFATKVCRCGLCGERMKLDRGKKRKKDGFTPMVYYCKNSRPYRNATCHNVLYQRDIVEDYIIHEVAKIQNNPNILKRGEYRTKEYELERQRKQLNETIKRNTDKLSKLNNLYLNDLITLEDLKKQSDLLIKRKRYSEERLALTYQTTEDDEREYRLKSFLAFPDLLTADYETQRKAVEMIVDRVELTKDKYIIHYNF

SEQ ID NO: 2620 - protein, 477 aa, Artificial Sequence
  Description of Artificial Sequence: Synthetic polypeptide
MAGQRVLGRIRLSRLTEESTSAARQRELIQQWADMNEHTVVGWAEDLDVSGSIDPFDSPSLGPWFREDKRDEWDILVAWKLDRIGRRAIALNRVFGWMMDHNKTLVCVSDNIDLSTWVGRLVANVIAGVAEGELEAIRERTRAGRKKILESGRWPGGVVPYGLRPVPNPGGGWKLEVDPEPASVIHRIVEEIIAGSAVEAVANRLDEDGIPAPKGGTWLPSTIWKLCGSNHLLGHARYGGKSVRDAEGRPVLNAEPILTWDQWDALQRALEARRRGGSRTRDTSPLLGVAVCYECDKPLFHKIYKRDYGRRLYRYYHCRDKTHNQQVEAEVVETLLEESFLQRIGDLPVLERVFIPSENHEIELEEARRAIEELTPLLATVTSATMRKSLLEQLSALDSRLTELEALPTREAHWEYRETGQTYAEAWKEADTEGRRQILLRSGITLAVILAGKARNSGGSLKFDFRVPEDIEKRLSA

SEQ ID NO: 2621 - protein, 477 aa, Artificial Sequence
  Description of Artificial Sequence: Synthetic polypeptide
MEATTKAAVYLRQSIDRTGEGLAVDRQREDCLKLCEDKGWEPVEYVDNDVSASTGKPRPAYKQMLADIRSGAVQAVVAWNLDRLHRRPIELEEFIELANKHKVALATVSGDTDLSTDSGRFYARMLGVVARHEMERKSARQKAAHRQRVKQGRPWWSGPPPFGYEADEGHENIRINKEEAKLIRKAYRDVLKGVAIHTIAKEWNAQGVKTRRGNDWAGPTVRQFLANPRNAGLKVYLGEVVGKAPWPAIIDEATYKSYMAYVKAPGRGPGKPLARKHLLSGIARCGRCGGRMGVGMTGRKYYDENGKEHRVDTYACKICFKVSRDRRKTDEVVRAVMIKLLSQPDALALAARPELPNVQELLEEANTIRDRMDNLAVEFADGGITASQMRIANERLQDRLEEVERKLVDVNSRRVLDGVIGVKDVAARWDSLPVERRRAIVETIATVTIQPTVRGRPFDPSLIEIRRRFPEEAPNGL

SEQ ID NO: 2622 - protein, 477 aa, Artificial Sequence
  Description of Artificial Sequence: Synthetic polypeptide
MMNRNKVAIYVRVSTQGQVDEGYSLDEQVDLLTNYCKLKAWTLYDVYVDPGISGKNMHRPEIERLTRDAKHKLFDIVLIYDLKRLGRSQKENIVLVEDVFNKNGIRLVSFTENFDASTPVGKMVFGMLSAYAELDRANIAERMMMGKIGRAKAGKAMSWGMPPFAYDYNKETGNLELDEAKAPIVEMIFSDYLKGASVNQIVQKLNSMDYNGKDHEWKHHAVTVILENPSYCGMTRYIDQIYEANHKPIIDKVTFDLVQIERKKRLSKYHDNDLVGPFQRKYIGSKFCYCGLCGANLKSEKDKRNKHTGIRPISFYCPNTRSRGTNDCTNKRFRQDILEGYILKEVAKLQQQPEKLRVIKPKKDAENESKLDNYKNKIRQNTSKLSKLNELYINDLMPIDELKKRSKTLYDENEFLEKQIEQLSSTTREDELRNKIDTFLAFPDILTADYETQKQAIEIVVSRVEVTKNGIDIFFNF

SEQ ID NO: 2623 - protein, 477 aa, Artificial Sequence
  Description of Artificial Sequence: Synthetic polypeptide
MITTRKVAIYVRVSTTNQAEEGYSIQGQIDSLIKYCEAMGWIIYEEYTDAGFSGGKIDRPAMSKLITDAKHKRFDTILVYKLDRLSRSVRDTLYLVKDVFNQNNIHFVSLQENIDTSSAMGNLFLTLLSAIAEFEREQITERMTMGKIGRAKSGKTMAWTYTPFGYDYNKEKGELILDPAKAPIVKMIYTDYLKGMSIQKIVDKLNKMDYNGKDCTWFPHGVKHLLDNPVYYGMTRYNNKLFPGNHQPIITKELFDKTQRERQRRRLGIEENHYTIPFQAKYMLSKFLRCRQCGSRMGLELGRPRKKEGKRSKKYYCLNSRPKRTASCDTPLYDAETLEDYVLHEIAKIQKDPSIASRQKHIEDHELKYKRERIEANINKTVNQLSKLNNLYLNDLITLEDLKTQTNTLIAKKRLLENELDKTCDNDDELDRQETIADFLALPDVWTMDYEGQKYAVELLVQRVKVDRDNIDIHWTF

SEQ ID NO: 2624 - protein, 476 aa, Artificial Sequence
  Description of Artificial Sequence: Synthetic polypeptide
MHFMQNRGSGPDAECDIYVRISQDLTGDELGVQRQEQRCRALAAQLKLNVRHVWVDNDLSATKKSVVRPDFEAMLQSKPQAIVCWHTDRLIRVTRDLERVIELGVNVYAVEAGHLDLSTPAGRAVARTVTAWATYEGEQKAARQKLANQQAAQQGRPYTAGIRPFGYADDHMTLIAEEAAAIVEGAQMILGGESLSAVARKWTESGLQSPRSKVTGANGWTLRGVKNVLTSPRYIGQSTYLGEVMGEGQWPPILDPEVYYSVVAILNNPERFSGGKRTGRTPDNLLSGIALCGYDGCTDTVNARGYRGVPVYGCGLTHTRTPRSIADDRASKATLARLMFPDFLGQILETQNAQDGHSGAQLQSQAQELRERLDGLAVAYAEGTISLSQMTAGSAALQKKLEAIESELVSAAGIPPLDPVKGVAGLIEGWPTLPLPTRRAWVDFCCIVTLNPARGRHMSSMTADDHVTIEWRDVSE

SEQ ID NO: 2625 - protein, 476 aa, Artificial Sequence
  Description of Artificial Sequence: Synthetic polypeptide
MYPFDMRVLGRIRLSRITEESTSAARQREIIQQWSDMNDHQIVGWAEDLDVSGSIDPFETPALGPWLAEDRRDEWDILVSWKLDRVGRRAIPLNRLFGWMLEHDKTLVCVNDNIDLSTWVGRLVANVIAGVAEGELEAIRERTKAGRQAVLRAGRWPGGPTPYGLRPARADVGARLEIVPEQAEVIHRIVREVCAGSSIEAVANRLNEDGVPSPKNGEWLPSTLWKIVTAKYLLGHATYEGNTVYDAEGRPVLNADPILTQDEWDDLQAAVAARRVNYTVRSKTTSPLHGVVYCLICDLPMFHKRMDRPYGKRHYRYYHCRDKQHGVFIDAEQVESAVEDTFIHVLGDVTVKERAWLPAEDHELEREEAERAIDDISALLGTMTSETVRSRLSTQLAALDSRLRELEGLPSREARWEYRETGQTYADAWREADTEERRQLLLRSGITAAVHVRGKTRNSGGAWEFEFRIPDAVKSL

SEQ ID NO: 2626 - protein, 476 aa, Artificial Sequence
  Description of Artificial Sequence: Synthetic polypeptide
MSFMQNRGSGQVAECDIYVRISQDLTGDEYGVQRQEKRCRALAAQLGLNVRHVWVDNDLSATKKNVVRPDFEALLQSNPQAIVCWHTDRLIRVTRDLERVIELGINVYAVEAGHLDLSTPAGRAVARTVTAWATYEGEQKAARQKLANQQAAQQGRPYTAGIRPFGYGDDHMTIIADEAAAIVEGAQMILAGESLSAVARKWDEAKLQSPRSKVTGAKGWTLRGVKQVLTSPRYAGMATYLGEVMGQAQWPPILDPEVHYSVVAILNSPERFSGGKRTGRTPGTLLAGIGQCGYDGCTDTVNGRGYRGVLVYGCKDTHTRTPRSIADDRVSKATLARLMFPDFLGQILESQNAQDGQSGAQLHSQAQELRDRLDGLAVAYAEGAISLSQMTAGSTALQKKLEEIESQMVSSAGIPPLDPVKGIAGLIEGWPTLPLPTRRAWVDFCCIVTLNPAKGRHLTSMSVDDHVTIEWRDVSE

SEQ ID NO: 2627 - protein, 476 aa, Artificial Sequence
  Description of Artificial Sequence: Synthetic polypeptide
MRGMNNRGSGSEAEADLYLRISQDVTGDELGVQRQETKCRELCKQLGLNVRHVWVDNDLSATKKSVVRPDFEAMLRSQPQAIVCWHTDRLIRVTRDLERVIELGVNVYAVEAGHLDLSTPAGRAVARTVTAWATYEGEQKAARQKLANQQAAQQGRPYTAGIRPFGYGDDHMTIMAEEAAAIVDGANMILAGESLSAVARKWSEAGLQSPRSKAAEAKGWTLRGVKKVLTSPRYIGQSTYLGEVMGKAQWPPILDPEIHYGVVAILNNPERFSGGRRTGRVAATLLAGIGQCGYDGCDDTVNGRGYRGVPVYGCGLTHTRTPRSIADDRASKATLARLMFPDFLGQILSSQNAQDGTSSAALQAEAEELRKRLDGLAMAYAEGAISLSQMTAGSGALQKKLEAIDAELVSSAGIPPLDPVKGVAGLIEGWPGLPLPTRRAWVDFCCVVTLNPAKGRHLTSMTTDDHVSIEWRDVEE

SEQ ID NO: 2628 - protein, 474 aa, Artificial Sequence
  Description of Artificial Sequence: Synthetic polypeptide
MNLMDENTPKNVGIYVRVSTEEQAKEGYSISAQKEKLKAYCISQGWDSYKFYIDEGKSAKDIHRPSLELMLRHIEQGIIDTVLVYRLDRLTRSVRDLYSLLDYFDKYQAVFRSATEVYDTGSATGRLFITLVAAMAQWERENLGERVKMGQVEKARQGQFSAPAPFGFTKEGESLVKNPEEGEVLLDMIDKIKKGYSLRELADYLDESDAIPKRGYKWHIASILVILKNPVLYGGFRWAGEILEGAFEGYISKKEFEQLQKMLHDRQNFKRRETSSIFIFQAKILCPNCGSRLTCERSIYFRKKDNKNVESNHYRCQACALNKKPAIGISEKKFEKALIEYMQNANFKREPKIPQEKQQDYDKLHQKIISIEKQRKKYQKAWSMELMTDQEFEQLMAETKEALQKALAKLEQNDLHPIEKPLNIERAKELAKMFRENWSVLTGEEKRQTVQELIKHIEFEKKDNKARILDIHFY

SEQ ID NO: 2629 - protein, 474 aa, Artificial Sequence
  Description of Artificial Sequence: Synthetic polypeptide
MKCVAYIRVSTDEQAKHGYSIAAQKERLEAYCVSQEWDLIDTFVDDGYSAKDLNRPHFKEMMERVKNDDIDVLLVYRLDRLTRSVLDLYEILKILDTHNCMFKSATEVYDTTNAMGRLFITLVAAIAQWERENTAERVKLGMEKKTKLGKWKGGMPPYGYKILNKELEVNQDEEPLIKYIFHLSKTLGFYTIAKKLTEQGFTTRKGGDWHVDTVRDIANNPIYAGYLTFNDPKDSKKPPRQQTLYDGQHSRIIPREEFWSLQDLLDKRRTFGGKRETSNYYFSSVLRCARCGSSMSGHKGSQGVKTYRCSGKKAGKKCTSHIIKEDNLVLTVLNSLEEITKQIIGDTNQNNISQQKITELETELKLIQKLMKKQKVMFENDVISINELIAKTENLRHQEKQLSEEISKYQKANNTNTEEIKFIMENIHSLWNDANDFERKQIISTIFNQLVIDTEDEYKRGTGASRKIIIVSAK

SEQ ID NO: 2630 - protein, 473 aa, Artificial Sequence
  Description of Artificial Sequence: Synthetic polypeptide
MNHRGSGPDAETDIYVRISQDLTGDELGVQRQEERCRALCAQLGLKVRHVWVDNDLSATKKDVVRPDFEAMLQSKPQAIVCWHTDRLIRVTRDLERVIELGINVYAVEAGHLDLSTPAGRAVARTVTAWATYEGEQKAARQKLANQQAAQQGRPYTAGIRPFGYGEDHMSIMAEEAAAIVEGAQMILAGESLSAVARRWDEAKLQSPRSKVTGAKGWTLRGVKKVLTSPRYVGQSTYLGEVMGEAQWPPILDPEVHYSVVAILNSPERFSGGKRTGRTPGTLLAGIGLCGYDDCTDTVNGRGYRGVPVYGCTATHTRTPRSIADDRASKATLARLMFPDFLGQILETQSAQDGRSGAQLQSQAQELRNRLDGLAVAYAEGSISLSQMTAGSTALQKKLEEIESEMVSSAGIPPLDPVKGVAGLIEGWPGLPLPTRRAWVDFCCIVTLNPAKGRHMTSMSVDDHVTIEWRDVEE

SEQ ID NO: 2631 - protein, 473 aa, Artificial Sequence
  Description of Artificial Sequence: Synthetic polypeptide
MQNRGSGQVAECDIYVRISQDLTGDEYGVQRQEKRCRALAAQLGLNVRHVWVDNDLSATKKNVVRPDFEALLQSNPQAIVCWHTDRLIRVTRDLERVIELGINVYAVEAGHLDLSTPAGRAVARTVTAWATYEGEQKAARQKLANQQAAQQGRPYTAGIRPFGYGDDHMTIIADEAAAIIEGAQMILAGESLSAVARAWDEAKLQSPRSKVTGAKGWTLRGVKQVLTSPRYAGMATYLGEVMGRAQWPPILDPEVHYSVVAILNSPERFSGGKRTGRTPGTLLAGIGQCGYDGCTDTVNGRGYRGVLVYGCKDTHTRTPRSIADDRASKATLARLMFPDFLGQILESQNAQDGPSGAQLQSQAQELRDRLDGLAVAYAEGAISLSQMTAGSTALQKKLEEIESQMVSTAGIPPLDPVKGIAGLIEGWPNLPLPTRRAWVDFCCIVTLNPAKGRHLTSMTVDDHVTIEWRDVEE

SEQ ID NO: 2632 - protein, 473 aa, Artificial Sequence
  Description of Artificial Sequence: Synthetic polypeptide
MQNRGSGQVAECDIYVRISQDLTGDEYGVQRQEKRCRALAAQLGLNVRHVWVDNDLSATKKNVVRPDFEALLQSNPQAIVCWHTDRLIRVTRDLERVIELGINVYAVEAGHLDLSTPAGRAVARTVTAWATYEGEQKAARQKLANQQAAQQGRPYTAGIRPFGYGDDHMTIIADEAAAIVEGAQMILAGESLSAVARKWDAAKLQSPRSKVTGAKGWTLRGVKQVLTSPRYAGMATYLGEVMGQAQWPPILDPEVHYSVVAILNSPERFSGGKRTGRTPGTLLAGIGQCGYDGCTDTVNGRGYRGVLVYGCKDTHTRTPRSIADDRASKATLARLMFPDFLGQILESQNAQDGQSGAQLQSQAQELRDRLDGLAVAYAEGAISLSQMTAGSTALQKKLEEIESQMVSSAGIPPLDPVKGIAGLIEGWPTLPLPTRRAWVDFCCIVTLNPAKGRHLTSMSVDDHVTIEWRDVSE

SEQ ID NO: 2633 - protein, 473 aa, Artificial Sequence
  Description of Artificial Sequence: Synthetic polypeptide
MQNRGSGQVAECDIYVRISQDLTGDEYGVQRQEKRCRALAAQLGLNVRHVWVDNDLSATKKNVVRPDFEAMLQSKPQAIVCWHTDRLIRVTRDLERVIELGINVYAVEAGHLDLSTPAGRAVARTVTAWATYEGEQKAARQKLANQQAAQQGRPYTAGIRPFGYGDDHMTIIADEAAAIVEGAQMILAGESLSAVARKWDEAKLQSPRSKVTGAKGWTLRGVKQVLTSPRYAGMATYLGEVMGQAQWPPILDPEVHYSVVAILNSPERFSGGKRTGRTPGTLLAGIGQCGYDGCTDTVNGRGYRGVLVYGCKDTHTRTPRSIADDRASKATLARLMFPDFLGQILESQNAQDGQSGAQLQSQAQELRDRLDGLAVAYAEGAISLSQMTAGSTALQKKLEEIESQMVSSAGIPPLDPVKGIAGLIEGWPTLPLPTRRAWVDFCCIVTLNPAKGRHLTSMTVDDHVTIEWRDVSE

SEQ ID NO: 2634 - protein, 473 aa, Artificial Sequence
  Description of Artificial Sequence: Synthetic polypeptide
MRNKVAIYVRVSTASQADEGYSIDEQKSKLEAYCEIKDWKIYDTYIDGGFSGANTQRPELERLISDAKRKKIDIVLVYKLDRLSRSQKDTLFLIEDVFAKNDVAFISLQENFDTSTPFGKASIGMLSVFAQLEREQIKERMMLGKEGRAKNGKSMSWTTIPFGYDYSKETGILSVNPTQALIVKRIFTEYLNGKSVVKIIRDLNAEGHVGRKRPWGETITKYLLKNETYLGKSKYKGKVFEGQHDAIISQELFDLVQLEVEKRQISAFEKYNNPRPFRAKYMLSGLMKCGYCGASLGLYVAPKNKNGVSKYKYQCRHRYHKDKAIRCNSGWYSKDELEKRVIKELERLKFDPKYKKETLAKKDETIKVEDIKKQLERINKQVSKLTELYLDEVITRKDLDEKNAKIKTERQYLEEQLENQKSNVMSIRKRKLSRLLKDFDIEKLSYEEASKIVKSVIKEIVVTKDDMTITLDF

SEQ ID NO: 2635 - protein, 473 aa, Artificial Sequence
  Description of Artificial Sequence: Synthetic polypeptide
MSPDKPLRAVGYVRLSKATDTSTSPERQRRDIARFIEARGWETVATVEDIDVSATRRRLDRPGIHELRRIFSRKAADVVVVSRLDRIARNVADVSTLLDEGIAIVSASEAFDTSTAQGRAMAQVAQVFAELEAKTIGLRVSSSRGHLPAIGRWPGGPTPYGFTTDELPGGGGRTLVHHPDEAPIVRRMVTRAIEGAGPSAIARELNADGIPSRRGVEWNVRTVGRILRHGSLRGYATVKGDKVRDEIGLPVVIWPPLITPEEARQLDAALARTPHPGSYGDGGPEPLLQGLALCSSCGSPMTPRHFRRPDLAAMYVCQSRNRGRLCDRPQTANAARLEGVAERLFLASYGRIPVVETVEEATVPDGLPEVLQAIEETTDAMRAPGADVMALAERLVALNGERERLKALPHTTTRSKATGELYADLWERSGTVERRELMRGLQAFVIVHPARARGHWNDDRVELVDYMAGQLDD

SEQ ID NO: 2636 - protein, 472 aa, Artificial Sequence
  Description of Artificial Sequence: Synthetic polypeptide
MGKRAVIYTRVSRDDTGEGQSNQRQETECRRLTDYRRMDVVAVEADISISASKGLERPAWLRVLGMVERGEVDYVIAYHMDRVTRSMTELEQLIEMCLKYEVGLATVSGDIDLTTDVGRMVARIIGAVARAEVERKAARQKLANAQRAAEGKPHVAGVRPFGYADDHRQVITIEAQAIRAAAEAALAGESMIGIAESWDQAGLHSARARRGHDKGSRPTKAGWSARGVRNVLVNPRYAGIRLYNGERVGQGDWEPILDVETHLRLVEKLTDPSRRKGTVKAGRTPTSLLTAIARCSVCEGTVRASSVRGRLTYSCRNSHAHVDREVADLMTQEWVIDRLAQPEVLAKLAPSGDDRVDQAKAVVEKRREALKTYARLLATGAMDEEQFIEASAVARREVEEAEAILSQAGTGDLLAGLDVGSDAVGPQFLALSLARQRGIVERLVDVTLLPASKARKVVTPEAERVVLADRAA

SEQ ID NO: 2637 - protein, 472 aa, Artificial Sequence
  Description of Artificial Sequence: Synthetic polypeptide
MMNRGGPTIRADIYVRISLDRTGEELGVERQEESCRELCKSLGMEVGQVWVDNDLSATKKNVVRPAFEAMLVSNPQAIICWHTDRLIRVTRDLERVIDLGVNVHAVMAGHLDLSTPAGRAVARTVTAWATYEGEQKAERQKLANIQNARAGKPYTPGIRPFGYGEDHMTVVGDEADAIRDGAKMILDGWSLSAVARYWEELGLQSPRSMAAGGKGWSLRGVKKVLTSPRYVGRSSYLGEVVGDALWPPILDPDVYYGVVAILNNPERFSGGARTGRTPGTLLSGIGQCGYDDCKDTVGGRGYRGVLVYGCKDTHTRTPRSIADARASNATLARLMFPDFLPGLLASGQTESGESAASMHAEAQTLRERLDGLATAYAEGAINLSQMTAGSEALRKKLEIVEAELVGSAGIPPFDPVAGVAGLISGWPDLPLPTRRAWVDFCCVVTLNPQRGRHLSSMTVDDHVTIEWRDVAE

SEQ ID NO: 2638 - protein, 472 aa, Artificial Sequence
  Description of Artificial Sequence: Synthetic polypeptide
MIPMKIIGYVRLSRASREESTSVVRQREIIEKTCAARDFELVDIVEDVDVSATKTRLDRPGLSEVRERIRAGHADAVMVWRLDRIARSVVDFGVLLDDGLDIISATEPLDTASPMGRAMAEVLQVFARLEAKTIGVRISASQEHLRKVGRFPGGVIPYGYRAVPHPDGVGRALEPHPAEAAVVRRMADEVLAGDSVYAVTTRLNRDGIPARRGTKWSTTSVQRILRSNAVLGRVKVRGELLRDDATGLPSVVWEPLLSVAEVERLRALTDWTPTPGRSEATAEGKRRKASRLLSGLIFCPGCGYPLTAKSRHTTGAPIYVCEARARGRVCPGGIAIECERVEEEVARQFLAVVGRWSLVEPRISVREVSGLAAVEEALRSTTDALRAPDANLPALFERLTKLRTERDRLAALPEEPVVEMLETGRTFAEAWAETDTAGRRSLLLNSGVSISIARAPQRGKWNPERVSVAFHG

SEQ ID NO: 2639 - protein, 472 aa, Artificial Sequence
  Description of Artificial Sequence: Synthetic polypeptide
MGAMRILGYVRLSRASREESTSVVRQREIIAKTCAARDFELVDIIEDVDVSATKTRLERPGLSEIRARIKAGEADAVMVWRLDRIARSVVDFGVLLDEGLDIISATEPLDTASPMGRAMAEVLQVFARLEAKTIGVRISASQEHLRRVGRFPGGVIPYGYRAVPHPDGVGRALEPHPEEAAVVRRMADEVLGGASVYAVTTGLNRDGIRPRRASEWTPTSVQRILRSNAVLGRVKVRGELLRDDATGLPLQVWEPILRVEEVERLRALTDWTPTPGRSEATAEGRRTKATRLLSGLIFCPGCGYPLTAKSRRSTGAPLYVCEARARGRVCPGGVAIECERVEEEVARQFLAVVGRWQAVEPRVSVREVSGLAAVEEALRATTDALRAPDADLPVLLERLTKLRAERDRLAALPEEPVVELVDSGRTFAQAWADQDVSGRRALLANSGAEITIERAPQRGKWSPERVRVAFHG

SEQ ID NO: 2640 - protein, 472 aa, Artificial Sequence
  Description of Artificial Sequence: Synthetic polypeptide
MAKVAIYARVSTLNQADEGYSIQGQVESLTKYCEAMSWTIHDTYIDAGFSGGKLERPEINRLINDVKLKKFDTVLVYKLDRLSRNVKDTLFLVKEIFTDNDIHFVSLKENIDTSSAMGSLFLTLLSAIAEFEREQIKERMMFGKLGRAKSGKTMSWTTSPYGYTYDKEQGKLIAIPSQAIVVKKLFDYYISGMSIANMLRKMNAEEQIGRTAEWSINAMKNILRNEVYYGMVKYRGQLFKGEHEPFISKKTFELAQIERERRKQYFSKKFKNTSPFKAKYMLSGLLRCGCCSQPLISNVQRKSANGRTNIFYQCKERYNKDLSKRCTESGRFRKEILEEFVINELSKIKINNKYVENFSKDEPKIDINNLKKEINSIEQKLEKVSELYIDGIVTRDILIKKSEKLIKQKEFVQKQIDEMDTVSEKDKMNIIKKTIDRWNPEKTSYEDTTLLVRKLVKYIVVDEERIDIFLNF

SEQ ID NO: 2641 - protein, 472 aa, Artificial Sequence
  Description of Artificial Sequence: Synthetic polypeptide
MIATNKVAIYVRVSTISQAEEGYSIDEQINKLKAYCDIKDWSIYDVYSDGGFSGASTNRPALERLINDAMKKEFDTVIVYKLDRLSRSQKDTLYLIEEIFNKYDIAFYSLAENFDTSTAFGKAMVGILSVFAQLEREQIKERMLLGKLGRAKAGHSMMWTNPPFGYRISKGDKVVSINPVQSVIVKRIFSEYIAGKPISKILTDLDTEGHVGRSKPWSLTTIKDILKNPTYWGKIRYQGELYDGLHEPIISEEEFKLAQVELRRRQDETFSRTNNPRPFQSKYMLSGLLKCGYCGSTLRIYVAHKRKDGTYPPLKYQCANRFSKDTKKRCNSRQYDKSELEATIISKLNQLRLNNDIEVVTKPNINKDELKQEIQAIATKLNRLTDLYVDGIINRDDLQKRRLALENQKSILESELAIDHDELLTRRKQTILEELGRLNLIEGSYVEQTTIVRKVVKEILVKTGSIDLMLDI

SEQ ID NO: 2642 - protein, 472 aa, Artificial Sequence
  Description of Artificial Sequence: Synthetic polypeptide
MQTKRKVAIYSRVSTLHQAEEGYSIGQQIEALTKYCQAMGWAIYDNYSDGGFSGGKLERPAMQKMIQDAESGKFDTVVVYKLDRLSRNVRDTLYLVKDVFNANNVDFVSLQENIDTKSAMGNLFITLLSAIAEFEREQIKERMQLGVKGRAKSGKTTSWTTPPFGYEYNTNTQLMTINHYQAEIVRDMFDKIISGWSIMGITTHLRKTNSKKWTHVRVKRILENVAYIGKVKYRDEIFDGEHAPILTEEVFYKAQKALEERTNKKDNTRPFQGLYMLSNIAKCGYCGTPLKIDSYKPRKDGTRKRTYTCINRNPKRIKTAIYNDGKQCKESGRYDVKDVEKYVLTEISKLQLNPKSIESLYRDKPEENITAHQERLKKLETKLSKLNDLYINELISMEVLKQKSAELLKEKSSLETFINNNKRKTNNKPAFEKVAKMDDIFKMSYDDQKRIVKTLIKRVEVKRDEINVIFKL

SEQ ID NO: 2643 - protein, 472 aa, Artificial Sequence
  Description of Artificial Sequence: Synthetic polypeptide
MNTKRKVAIYSRVSTLHQAEEGYSIGQQIEALTKYCQAMGWVIYDNYSDGGFSGGKLERPAMQKMIQDAKSGKFDTVVVYKLDRLSRNVRDTLYLVKDVFNANNVDFVSLQENIDTKSAMGNLFITLLSAIAEFEREQIKERMQLGVKGRAKSGKTTSWTTPPFGYEYDTNTQLMTINHYQAEIVRDIFDKIISGWSIMGITTHLRKTNNKKWTHVRVKRILENVAYIGKVKYRDEIFDGEHAPILTEEIFYKAQKALEERTSKKDNTRPFQGLYMLSNIAKCGYCGTPLKIDSYKPRKDGTRKRTYTCINRNPKRIKTATYNDGKQCKESGRYDVKDVERYVLNEISKLQLNPKSIESLYIDKPEENITAHQERLKKLETKLSKLNDLYINELISMEALKQKSAELLKEKSSLETFINNNKRKINNKPAFEKVAKMDDVFKMSYDDQKKIVKTLIKRVEVKRDEINVIFKL

SEQ ID NO: 2644 - protein, 471 aa, Artificial Sequence
  Description of Artificial Sequence: Synthetic polypeptide
MKVVLYVRVSTQEQVEEGYSIDSQLANLRKFAESQNWEVIGEYVDEGFSAKNLKRPSIENLMNDVPKKKFDVVLVYKLDRLVRSVLDLHNLLNLFDKHGVMFRSATEMFDTTSAMGRFFISIVGSMAAWERENLGERVFVNMKHKAEEGKRPGGKAPFGYDASKDSLVINEDEAQWVRWIFNEYRTKGKDMISFELNSRGVRTKNGRLWSNSVLDYLINNPVYAGYIRWNRRDISGKVKEDIVLVKGDHEPIISQEVFDEAQRIQKKRYVFKEKGNKHYPFTGILKCERCGMPLYAERAKRKNGYRIYYKCSGRFNHNICKLPVIPTEVIENEFLRLLKADVLYSEPEKEIDTSSIRKQLKALERKIERMKELYIEGDIEKDDYNVRMREAKQKELALWQTLDDNTHYFTKEQFIELASNIRAVWQEATDEERKKAVHAIMDYIYVDVTKESQRTVGSLPEIAFTRTKVLS

SEQ ID NO: 2645 - protein, 471 aa, Artificial Sequence
  Description of Artificial Sequence: Synthetic polypeptide
MGGVRAIIYNRVSSDPTGRGRSVADQETENRAICERNGWTIGEVLTDNDRSATRFATRERPEYRRLTEILQRGDVLVTWEASRAQRDLEAYVALRNLCAERGVLWCYSGKVYDLTVGDDRFVTGLDALLAEKEAEQTRERIMRGHRTNLAAGGAHGHVPFGYRIVRDPTTGRPLQRVPDEATAPLVQEAARRVLAGESVRSIVADLKVRTPGKPWSTSTLRRMLMNPTYAGYRTHRGEIARKGTWEPLIAQDDHDRLVALFGSRRTVPRGAAPKYLLTGIAVCGVCGGRLIMRQQGSVPAAKKRVDGKLWFYGCEGGHVGRDREKVDDAVTRVVVALLSNPDELAKLAEPSDATPAGDDVDDVAELRQRLTDAVDAYDAGKLSIEMLARIEARLQPRIEAAEERSKARYLSPVVAQVAAAPDSAGAWSALTLADKREFLRATMHIEVQRVRSRWELGVEVYPLRMAPHADA

SEQ ID NO: 2646 - protein, 471 aa, Artificial Sequence
  Description of Artificial Sequence: Synthetic polypeptide
MRKVAIYSRVSTINQAEEGYSIQGQIEALTKYCEAMEWKIYKNYSDAGFSGGKLERPAITELIEDGKNNKFDTILVYKLDRLSRNVKDTLYLVKDVFTANNIHFVSLKENIDTSSAMGNLFLTLLSAIAEFEREQIKERMQFGVMNRAKSGKTTAWKTPPYGYRYNKDEKTLSVNELEAANVRQMFNMIISGCSIMSITNYARDNFVGNTWTYVKVKRILENETYKGLVKYREQTFSGDHQAIIDEKTYNKAQIALAHRTDTKTNTRPFQGKYMLSHIAKCGYCGAPLKVCTGRAKNDGTRRQTYVCVNKTESLARRSVNNYNNQKICNTGRYEKKHIEKYVIDVLYKLQHDKEYLKKIKKDDNIIDITPLKKEIEIIDKKINRLNDLYINDLIDLPKLKKDIEELNHLKDDYNKAIKLNYLDKKNEDSLGMLMDNIDIRKSSYDVQSRIVKQLIDRVEVTMDNIDIIFKF

SEQ ID NO: 2647 - protein, 471 aa, Artificial Sequence
  Description of Artificial Sequence: Synthetic polypeptide
MRKVAIYSRVSTINQAEEGYSIQGQIEALTKYCEAMEWKIYKNYSDAGFSGGKLERPAITELIEDGKNNKFDTILVYKLDRLSRNVKDTLYLVKDVFTANNIHFVSLKENIDTSSAMGNLFLTLLSAIAEFEREQIKERMQFGVMNRAKSGKTTAWKTPPYGYRYNKDEKTLSVNELEAANVRQMFDMIISGCSIMSITNYARDNFVGNTWTHVKVKRILENETYKGLVKYREQTFSGDHQAIIDEKTYNKAQIALAHRTDTKTNTRPFQGKYMLSHIAKCGYCGAPLKVCTGRAKNDGTRRQTYVCVNKTESLARRSVNNYNNQKICNTGRYEKKHIEKYVIDVLYKLQHDKEYLKKIKKDDNIIDITPLKKEIEIIDKKINRLNDLYINDLIDLPKLKKDIEELNHLKDDYNKAIKLNYLDKKNEDSLGMLMDNIDIRKSSYDVQSRIVKQLIDRVEVTMDNIDIIFKF

SEQ ID NO: 2648 - protein, 471 aa, Artificial Sequence
  Description of Artificial Sequence: Synthetic polypeptide
MRKVAIYSRVSTINQAEEGYSIQGQIEALTKYCEAMEWKIYKNYSDAGFSGGKLERPAITELIEDGKNNKFDTILVYKLDRLSRNVKDTLYLVKDVFTANNIHFVSLKENIDTSSAMGNLFLTLLSAIAEFEREQIKERMQFGVMNRAKSGKTTAWKTPPYGYRYNKDEKTLSVNELEAANVRQMFNMIISGCSIMSITNYARDNFVGNTWTHVKVKRILENETYKGLVKYREQTFSGDHQAIIDEKTYNKAQIALAHRTDTKTNTRPFQGKYMLSHIAKCGYCGAPLKVCTGRAKNDGTRRQTYVCVNKTESLARRSVNNYNNQKICNTGRYEKKHIEKYVIDVLYKLQHDKEYLKKIKKDDNIIDITPLKKEIEIIDKKINRLNDLYINDLIDLPKLKKDIEELNHLKDDYNKAIKLNYLDKKNEDSLGMLMDNINIRKSSYDVQSRIVKQLIDRVEVTMDNIDIIFKF

SEQ ID NO: 2649 - protein, 471 aa, Artificial Sequence
  Description of Artificial Sequence: Synthetic polypeptide
MRKVAIYSRVSTINQAEEGYSIQGQIEALTKYCEAMEWKIYKNYSDAGFSGGKLERPAITELIEDGKNNKFDTILVYKLDRLSRNVKDTLYLVKDVFTANNIHFVSLKENIDTSSAMGNLFLTLLSAIAEFEREQIKERMQFGVMNRAKSGKTTAWKTPPYGYRYNKDEKTLSVNELEAANVRQMFDMIISGCSIMSITNYARDNFVGNTWTHVKVKRILENETYKGLVKYREQTFSGDHQAIIDEKTYNKAQIALAHRTDTKTNTRPFQGKYMLSHIAKCGYCGAPLKVCTGRAKNDGTRRQTYVCVNKTESLARRSVNNYNNQKICNTGRYEKKHIEKYVIDVLYKLQHDKEYLKKIKKDDNIIDITPLKKEIEIIDKKINRLNDLYINDLIDLPKLKKDIEELNHLKDDYNKAIKLNYLDKKNEDSLGMLMDNLDIRKSSYDVQSRIVKQLIDRVEVTMDNIDIIFKF

SEQ ID NO: 2650 - protein, 470 aa, Artificial Sequence
  Description of Artificial Sequence: Synthetic polypeptide
MMNRGGPTVRADIYVRISLDRTGEELGVERQEESCRELCKSLGMEVGQVWVDNDLSATKKNVVRPDFEAMIASNPQAIVCWHTDRLIRVTRDLERVIDLGVNVHAVMAGHLDLSTPAGRAVARTVTAWATYEGEQKAERQKLANIQNARAGKPYTPGIRPFGYGDDHMTIVTAEADAIRDGAKMILDGWSLSAVARYWEELKLQSPRSMAAGGKGWSLRGVKKVLTSPRYVGRSSYLGEVVGDAQWPPILDPDVYYGVVAILNNPDRFSGGPRTGRTPGTLLAGIALCGECGKTVSGRGYRGVLVYGCKDTHTRTPRSIADGRASSSTLARLMFPDFLPGLLASGQAEDGQSAASKHSEAQTLRERLDGLATAYAEGAISLSQMTAGSEALRKKLEVIEADLVGSAGIPPFDPVAGVAGLISGWPTTPLPTRRAWVDFCLVVTLNTQKGRHASSMTVDDHVTIEWRDVAE

SEQ ID NO: 2651 - protein, 470 aa, Artificial Sequence
  Description of Artificial Sequence: Synthetic polypeptide
MTISGGTDEALFYFRISLDATGERLGVERQEPPCLELCRSKGFTPGKAYIDNDLSATKEGVVRPEFEALLRDLKLRPRPVIVWHTDRLVRVTKDLERVISTGVNVYAVHAGHFDLSTPAGRAVARTLTAWAQYEGEQKALRQKEANLQRAQMGKPWWPRRPFGLEKDGELNEPEALSLRKAYADLLSGASLTDLAADLNAAGHTTNKGGAWTSTSLRPVLMNARNAAIRTYDGEEIGPANWKAIVPEETWRAAVRLLSSPSRKTGGGGKRLHLMTGVAKCSVCDSDVKVEWRGKKGEPTAYTVYACRGKHCLSHRQKWVDDRVETLVLERLSQEDAAAVWAVDNDTELADVREEVVTMRERLEAFAEDYADGAISRAQMQAGSARVREKLEAAEAQMAYLAAGSPLGELIASNDVEKTWESLTLDRKRAVIEAMTRKVTLYPRGRGIRSHRPEDCQVEWVDERPRLSAVS

SEQ ID NO: 2652 - protein, 470 aa, Artificial Sequence
  Description of Artificial Sequence: Synthetic polypeptide
MSKRAVIYTRVSRDDTGEGQSNQRQEAECRRLTDYRRLDVVAVEADISISASKGLERPAWLRVLGMIERGEVDYVIAYHMDRVTRSMTELEQLIEMCLKYDVGVATVSGDIDLTTDVGRMVARIIGAVARAEVERKSARQKLANAQRAAEGKPHVSGIRPFGYADDHRQVVTIEAQAIRAAAEAALAGESMIGIAESWSKDGLLSARARRGHDKGNRPTKAAWSARGVRNVLVNPRYAGIRLYNGERVGQGDWEPILDVETHLRLVEKLTDPTRRKGTVKTGRVAASLLTAIARCEVCGQTVRASSVRGRQTYACRNSHAHVDRSTADLMTQEWVISRLADPDTLAKLAPSGDDRVDEAKATIEKRREALKTYARLLATGAMDEDQFTEASAVARSEMQEAEAVLTEAGTGDLLAGLDVGSDAVGPQFLALSLARQRGIVEALVDVTLRPASKARKVVTPEHERVVLADR

SEQ ID NO: 2653 - protein, 470 aa, Artificial Sequence
  Description of Artificial Sequence: Synthetic polypeptide
MSKRAVIYTRVSRDDTGEGQSNQRQEAECRRLTDYRRLDVVAVEADISISASKGLERPAWLRVLGMIERGEVDYVIAYHMDRVTRSMTELEQLIEMCLKYDVGVATVSGDIDLTTDVGRMVARIIGAVARAEVERKSARQKLANAQRAAEGKPHVSGIRPFGYADDHRQVVTIEAQAIRAAAEAALAGESMIGIAESWSKDGLLSARARRGHDKGNRPTKAAWSARGVRNVLVNPRYAGIRFYNGERVGQGDWEPILDVETHLRLVEKLTDPTRRKGTVKTGRVAASLLTAIARCEVCGQTVRASSVRGRQTYACRNSHAHVDRSTADLMTQEWVISRLADPDTLAKLAPSGDDRVDEAKATIEKRREALKTYARLLATGAMDEDQFTEASAVARSEMQEAEAVLTEAGTGDLLAGLDVGSDAVGPQFLALSLARQRGIVEALVDVTLRPASKARKVVTPEHERVILADR

SEQ ID NO: 2654 - protein, 470 aa, Artificial Sequence
  Description of Artificial Sequence: Synthetic polypeptide
MPIVVYVDEGVSGGAELDKRPDLARLMREWQPGDVVLFWKLDRLARSMVHFVDIMRLAEKAGVALVSIADNIDLSTDEGKFLAHILATFAEFERSQIRSRTANARRHMIKVGRWTGGRVPYGLKAAPHPDGVGKTLVRDPFAVAIIRRIYELVMGVNHPEGKGLAITTIAASLQAEGVPSPRVHTSTKANPAPAAWSSKAIRVIMESPTVVGHDTDPYTGRVIRGEDGKPVQVWAPALTVEEQAQVLERIGPSVKRAKAGDRHWLYGVAVCGVCGGNMKRTNGGKFQPDVVIFRCRGTLKAPHGNVSVRAEELARWVDAKVLERLGPGQAVKREFVEGTGPAGDLERLKEYLEELEEDRKAGMYSAPGAIERFRQSYAETTRQIAELEANPPTEPGWQLVPTGRTFAEEWAAKPLAERGRYLFDAEASVAVRPPEVKRTVEPLDKRCTLDLGELEDMALELESVVADAME

SEQ ID NO: 2655 - protein, 470 aa, Artificial Sequence
  Description of Artificial Sequence: Synthetic polypeptide
MGSYCQFMRAIIYCRVSSDPHARGKSVTEQEADCRATSKAHGWDIGEVLVDNDRGASRYSRKDRPAYRRLAELLAPGDVLVTWEASRAQRDLSAYLQLRDLCAERGVLWSYSGRTYDLARGDDRFTTGLDALLSEKEVEVTRERVLRSMRANAAAGRPHGKLPYGYMIVRDPHTGKTLDRVANPDTAPTFREAVQRVLDGDSLYAVCQDFNARGVPAPRPRRDGTPAKWIPVTLRKILESPTYAGLRLSNGEVIGQATWEPLISMEEHERLKALFADPHRLTHRGSEPQWLLAGIARCGVCGATVKRIKSRGVQTYTCRDGFHTARMVTTVEDYVVEAMMRRLEGQDLVGQIDSDNAEYASAVEAVRALRQRIDSFTDAAADGEVTPTALARIEAKLLPQIERAEGRVRALAHSPAVAKIAGAGARERWEALTVRDRRDLVRALVDVQIHRVGKGRRNVPIGEGIGLTWL

SEQ ID NO: 2656 - protein, 470 aa, Artificial Sequence
  Description of Artificial Sequence: Synthetic polypeptide
MRVIGYVRLSRASREESTSVVRQRDIITRTASARDLDLVGIVEDVDVSATKSRLDRPGLDEVRARVRAGEADAVLVWRLDRIARSVVDFGTLLDDGLDIISATEPLDTASPMGRAMAEVLQVFARLEAKTIGLRVAASQEHLRKIGRWPGGVLPYGYRAVPHPEGAGRALEPDPAESAVVRRMADECLSGRPVYAIAQGLNADGIPPRRASSWSPTSVQRILRSNAVLGRVKVRGDLLRDDAGVPVQVWAPLLDVDEVERLRALTDWSPIPGRSAATAAGKRRKASRLLSGLLYCPGCGGPLVARTRRDTALYSCGASARGRACPGGVAVEADRVEAEVARRFLAAFGRLEVVEARESSAPVAGLAAVEEAIRDTTDALRDPAADVPVLVDRLTSLRAERDRLAALPSAPTVALVETGESFATAWDRLDVAGRRRMLTAAGLEVEIGRGLRGRWTPDRIQARVAGQDLPV

SEQ ID NO: 2657 - protein, 470 aa, Artificial Sequence
  Description of Artificial Sequence: Synthetic polypeptide
MHQAIEGYSIEQQRDSLTKYCEAMEWNIYDIYIDAGFSGGKLERPAMDKLIREAEAGKFDTVAVYKLDRLSRSVQDTLHLIRDVFKEHDIDFVCLQENIDTKSAMGNLFLTLLSAIAEFEREQITERMAMGRHGRAKSGKSMMWARPAYGYRYDRESQTVSVVQSEAMIVKRIYKEYLEGKSVSQIKNDLNSEGHITKEKPWVYKRITYILQSRVYTGVNEYKGEIYDGKHEAIIDTETFELTQMEFAKRQQQTKDKKNNPRPFQAKYMLSGLARCGYCKAPLKLRLGAVRKDGTRAMVYDCHNRWNRKVTYLTIYNDNKQCTESGRYQKADLEAYVLDKIKELQLNPDTIREKMDLNEKPTANTEEIKKQIAKINQQIDKLNDLYLNDLITVEKLKERAGKLKKERELLEVELSKNSDHLFKAKKKQLNDLLMNKDIDSMTYEEQRNLVKMLIYKVDVTKEDINIIFDF

SEQ ID NO: 2658 - protein, 470 aa, Artificial Sequence
  Description of Artificial Sequence: Synthetic polypeptide
MSKRAVIYTRVSRDDTGEGRSNDRQEAECRRLTDYKRLDVVAVEADISISAYSGKARPAWKRVLNMVRAGEVDYVIAYHMDRMTRSMLDLEELILLCEEHNVGIATAVGDIDLTSDMGRMVARILAAVARAEVERKSARQKLANAQRAAEGKPHVSGIRPFGYGDDHLTLIPEEADAIRDAARRALAGETMISIAKSWTEAGLISARARRGHDKGKRATEAGWSARGVRNVLISPRYAGIRTYNGEPVGEGDWEPILDRETHLALVDTLGDPARRKGAVKMGRRPTSLLTAFALCEVCDGPVRASAIRGRQTYTCRAGHGHADRAIADAEVSAATIALLASPQWMTLIVPSGDERVEEAKAEVDDLKLKLKTYAELLANDVMDVEQFTQATATARAKLKGAEELLSRAGMGPMFVGLSLGTPAVADQWEGLGLDRQRAIVQGLLSVKVRRKAKGMSFEDQIVVEPRYVAA

SEQ ID NO: 2659 - protein, 469 aa, Artificial Sequence
  Description of Artificial Sequence: Synthetic polypeptide
MYYERSYLRSCQVSSYEQATEGYSIHEQERKLKAFCEVQNWNEFKVFTDAGVSGGSMNRPALKRIMDNLEYYDLVLVYKLDRLTRNVKDLLEMLETFEKYNVAFKSATEVFDTTTAIGKLFITMVGAMAEWERATIRERALFGSRAAVREGNYIREAPFCYDNVDGKLVPNEHKWVIDYLVEQFKHGVSGNEIARQMNLKKINVPKVKKWNRTSIIRLMKNPVLRGHTKYGDMYIENTHEPVLSESDYKRIIDIIENKTHRSKVKHHAIFRGVLTCPQCHNKLHLYAGKITDKKGYSYEVRRYKCDTCSKDKNVQTISFNESEVEDKFIELLKTYDMNKFKVDIVEESTPKVDYDIDKIMKQREKLTRSWSLGYIEDDEYFSLMDETKEILDKVERAGVEIESTQTVTNEQLNMIDSILIKGWSKLNVEQKEELILSTVKEIVFDFVPRKDNENGKVNTLDIREITFKF

SEQ ID NO: 2660 - protein, 468 aa, Artificial Sequence
  Description of Artificial Sequence: Synthetic polypeptide
MRAIIYNRVSSDPTGRGRSVADQEAENRAVCERNGWTIGEVLTDNDRSATRFATRDRPEYRRLTEILRRGDVLVTWEASRAQRDLEAYVALRNLCAERGVMWCYSGKVYDLTVGDDRFVTGLDALLAEKEAEQTRERIMRGHRSNLAAGGAHGHVPFGYRIVRDATTGRPLRRVPDETTAPLVQDAARRVLAGESVRSIVADLKVRTPGKPWSTSTLRRMLMNPTYAGYRTHHGEIACKGTWEPLITQEDHDRLVALFGSRRGVPRGAAPKYLLTGIAVCGVCGGKLIMRQQGSVAAAKKRADGKLWFYGCEYGHVGRDRAKVDDAVTRVVVALLSDPGELAKLAEPVDDEPAVDDGDDVAELRQRLADAVDAYDAGKISIEMLARIEARLQPRIEAAEGRSKARFVSPVVAQVAAALDPAAAWAALQLEEKREFLRATMHIEVQRVRSRWELGVEAYPLRMASRIDA

SEQ ID NO: 2661 - protein, 468 aa, Artificial Sequence
  Description of Artificial Sequence: Synthetic polypeptide
MRAIIYNRVSSDPTGRGRSVADQETENRAICERNGWTIGEVLTDNDRSATRFATRERPEYRRLTEILQRGDVLVTWEASRAQRDLEAYVALRNLCAERGVLWCYSGKVYDLTVGDDRFVTGLDALLAEKEAEQTRERIMRGHRTNLAAGGAHGHVPFGYRIVRDPTTGRPLQRVPDEATAPLVQEAARRVLAGESVRSIVADLKVRTPGKPWSTSTLRRMLMNPTYAGYRTHRGEIARKGTWEPLIAQDDHDRLVALFGSRRTVPRGAAPKYLLTGIAVCGVCGGRLIMRQQGSVPAAKKRADGKLWFYGCEGGHVGRDREKVDDAVTRVVVALLSNPDELAKLAEPSDATPAGDDVDDVAELRQRLTDAVDAYDAGKLSIEMLARIEARLQPRIEAAEERSKARYLSPVVAQVAAAPDSAGAWSALTLADKREFLRATMHIEVQRVRSRWELGVEVYPLRMAPHADA

SEQ ID NO: 2662 - protein, 468 aa, Artificial Sequence
  Description of Artificial Sequence: Synthetic polypeptide
MRAIIYNRVSSDPTGRGRSVADQETENRAICERNGWTIGEVLTDNDRSATRFATRERPEYRRLTEILQRGDVLVTWEASRAQRDLEAYVALRNLCAERGVLWCYSGKVYDLTVGDDRFVTGLDALLAEKEAEQTRERIMRGHRTNLAAGGAHGHVPFGYRIVRDPTTGRPLQRVPDEATAPLVQEAARRVLAGESMRSIVADLKVRTPGKPWSTSTLRRMLMNPTYAGYRTHRGEIARKGTWEPLIAQDDHDRLVALFGSRRTVPRGAAPKYLLTGIAVCGVCGGRLIMRQQGSVPAAKKRADGKLWFYGCEGGHVGRDREKVDDAVTRVVVALLSNPDELAKLAEPSDETPAGDDVDDVAELRQRLTDAVDAYDAGKLSIEMLARIEARLQPRIEAAEERSKARYLSPVVAQVAAAPDPAGAWAALTLADKREFLRATMHIEVRRVRSRWELGVEVYPLRMAPHADA

SEQ ID NO: 2663 - protein, 468 aa, Artificial Sequence
  Description of Artificial Sequence: Synthetic polypeptide
MRAIIYNRVSSDPTGRGRSVADQETENRAICERNGWTIGEVLTDNDRSATRFATRERPEYRRLTEILQRGDVLVTWEASRAQRDLEAYVALRNLCAERGVLWCYSGKVYDLTVGDDRFVTGLDALLAEKEAEQTRERIMRGHRTNLAAGGAHGHVPFGYRIVRDPTTGRPLQRVPDEAAAPLVQEAARRVLAGESVRSIVADLKVRTPGKPWSTSTLRRMLMNPTYAGYRTHRGEIARKGTWEPLITQDDHDRLVALFGSRRTVPRGAAPKYLLTGIAVCGVCGGRLIMRQQGSVPAAKKRADGKLWFYGCEGGHVGRDREKVDDAVTRVVVALLSNPDELAKLAEPSDEAPAGDDVDDVAELRQRLTDAVDAYDAGKLSIEMLARIEARLQPRIEAAEERSKARYLSPVVAQVAAAPDPAGAWAALTLADKREFLRATMHIEVQRVRSRWELGVEVYPLRMAPHTDA

SEQ ID NO: 2664 - protein, 468 aa, Artificial Sequence
  Description of Artificial Sequence: Synthetic polypeptide
MRAIIYNRVSSDPTGRGRSVADQETENRAICERNGWTIGEVLTDNDRSATRFATRERPEYRRLTEILQRGDVLVTWEASRAQRDLEAYVALRNLCAERGVLWCYSGKVYDLTVGDDRFVTGLDALLAEKEAEQTRERIMRGHRTNLAAGGAHGHVPFGYRIVRDPTTGRPLQRVPDEAAAPLVQEAARRVLAGESVRSIVADLKVRTPGKPWSTSTLRRMLMNPTYAGYRTHRGEIARKGTWEPLITQDDHDRLVALFGSRRTVPRGAAPKYLLTGIAVCGVCGGRLIMRQQGSVPAAKKRADGKLWFYGCEGGHVGRDREKVDDAVTRVVVALLSNPDELAKLAEPSDETPAGDDVDDVAELRQRLTDAVDAYDAGKLSIEMLARIEARLQPRIEAAEERSKARYLSPVVAQVAAAPDPAGAWAALTLADKREFLRATMHIEVRRVRSRWELGVEVYPLRMAPHTDA

SEQ ID NO: 2665 - protein, 468 aa, Artificial Sequence
  Description of Artificial Sequence: Synthetic polypeptide
MRAIIYNRVSSDPTGRGRSVADQETENRAICERNGWTIGEVLTDNDRSATRFATRERPEYRRLTEILQRGDVLVTWEASRAQRDLEAYVALRNLCAERGVLWCYSGKVYDLTVGDDRFVTGLDALLAEKEAEQTRERIMRGHRTNLAAGGAHGHVPFGYRIVRDPTTGRPLQRVPDEATAPLVQEAARRVLAGESMRSIVADLKVRTPGKPWSTSTLRRMLMNPTYAGYRTHRGEIARKGTWEPLIAQDDHDRLVALFGSRRTVPRGAAPKYLLTGIAVCGVCGGRLIMRQQGSVPAAKKRADGKLWFYGCEGGHVGRDREKVDDAVTRVVVALLSNPDELAKLAEPSDETPAGDDVDDVAELRQRLTDAVDAYDAGKLSIEMLARIEARLQPRIEAAEERSKARYLSPVVAQVAAAPDPAGAWAALTLADKREFLRATMHIEVQRVRSRWELGVEVYPLRMAPHADA

SEQ ID NO: 2666 - protein, 468 aa, Artificial Sequence
  Description of Artificial Sequence: Synthetic polypeptide
MRAIIYNRVSSDPTGRGRSVADQEAENRAVCERHGWTIGEVLTDNDRSATRFATRDRPEYRRLTEILRRGDVLVTWEASRAQRDLEAYVALRNLCAERGVLWCYSGKVYDLTVGDDRFVTGLDALLAEKEAEQTRERIMRGHRSNLAAGGAHGHVPFGYRIVRDATTGRPLRRVPDETTAPLVQDAARRVLAGESVRSIVADLKARTPGKPWSTSTLRRMLMNPTYAGYRTHHGEIACKGTWEPLITQEDHDRLVALFGSRRGVSRGAAPKYLLTGIAVCGVCGGKLIMRQQGSVPAAKKRADGKLWFYGCEHGHVGRDRAKVDDAVTRVVVALLSDPGELAKLAEPVDDAPVVDDGDDVAELRQRLADAVDAYDAGKISIEMLARIEARLQPRIEAAEERNKARFVSPVVAQVAAALDPAAAWGALQLEEKREFLRATMHIEVQRVRSRWELGVEVYPLRMASRIDA

SEQ ID NO: 2667 - protein, 466 aa, Artificial Sequence
  Description of Artificial Sequence: Synthetic polypeptide
MRRMRAIIYCRVSSDPHARGKSVSEQEVDCRATAKAHGWDVGEVLVDNDRGASRYSRKDRPAYRRLAELLAPGDVLVTWEASRAQRDLSAYLQLRDLCAERGVLWSYSGRTYDLARGDDRFTTGLDALLSEKEVEVTRERVLRSMRANAAAGRPHGKLPYGYMIVRDPHTGRTLDRVANPDTAPTFREAVQRVLDGDSLYAVCQDFNARGVRAPRPRRDGTPAKWIPVTLRKILESPTYAGLRSHNGEVIGEATWEPLLSMEEHERLKALFADPHRLTHRGSEPQWLLAGIARCGVCGATVKRIKSRGIQTYTCRAGFCAARMVTTVDDYVTEAVMRRLEGQDLVGQIDSDNAEYATAVEAVRALRQRLDSFTDAAAEGEVTPSALARIEAKLLPQIERAEGRARALAHSPAVAKIAGTGARERWDALAVRDRRDLVRALVDVQIHRVGKGRRNVPIGEGIGLTWL

SEQ ID NO: 2668 - protein, 465 aa, Artificial Sequence
  Description of Artificial Sequence: Synthetic polypeptide
MKLRAAIYVRVSTMEQAEEGYSISAQTEKLKSYANAKDYQVVKVFTDPGYSGAKLERPGLQNMIKSIESKEIDVVLVYKLDRLSRSQKNTLFLIEDVFLKNHVQFTSMQESFDTSTSFGRAMIGILSVFAQLERDAITERMQMGAKERAKAGMWRGGPQSRLPFGYRYIDGVLLVDDYEAMIVKYMYTEFIKGTPLTKIQSKVAAKFPVKETLIYPSIMKNILQNNIYIGKIKYAGETYEGLHEHILDTETYDKAQQLWEHRNTNKKKYFESKYLLSGILYCGHCGGKMASTGAGLLKSGERVTDYICYSKKGTPSHMVVDRNCPSKRHRVNRLDPKIVELLKTITFEEMQKDNSFTDNTTTIKSEIESLDTKISKLLDLYQDGLVPIDVLNDRISKLNDDKELLQETLISQKKQIHPEEIAKNIQTAKDFDWANSDSAAKRAMVRALINKVELTNEDMKIEWNI

SEQ ID NO: 2669 - protein, 465 aa, Artificial Sequence
  Description of Artificial Sequence: Synthetic polypeptide
MAVGIYIRVSTEEQAKEGYSISAQREKLKAYCQVQDWNDFRFYVDEGISAKDTNRPQLQLMLQHIKEGMIDTVLVYRLDRLTRSVVDLYKLLELFGKHNCTFKSATEVYDTSTAMGRLFITLVAALAQWERENLAERVRMGQIQKAREGQYSAKAPFGFDKDENERLIINEDEKRVILDMIDKIKEGYSIRQLADYLNNSGIPPIRGYQWHIASILSILKNPALYGAVKWRDEIIEGAHEGIITKKEYQHLLKLLESRQNFKKRETYSIFIFQMKIICPQCGNRLASERTRYYRKRDNKIVESNQYRCQACTLNKRKSIGVSERKMEKAFVRYMNEFKIEYTPELPKKENDEREKIQAQLMKIEHQRAKYQKAWANDFITDEEFSALMKETRSIYEELTHKLETLQPEEEQTVDKEKIKRIVTNFKLNWSYLSPDEKRQFINTFVESIQFEKQDGTVQILDVNFY

SEQ ID NO: 2670 - protein, 465 aa, Artificial Sequence
  Description of Artificial Sequence: Synthetic polypeptide
MRAVLYLRQSVAREDSISLELQETAGREYCKQRGYTITAVEADPGISGRTWKRPAVLRVMGMIESKEADVIVLWKWSRLSRSRLDWAVAADKVESAGGRIESATEPLDVSTSAGRLARGMLTEFAAFESERIGDIWKETHERRVRQGLPANGKPRFGYQYTKGEGFSPDPITGPVLADLYRRYLSGQSVYSLVKYLNDGPIRPVTGYGVSSDGLWSARTLRRILDQGFGAGFITRHGERIPGVHEPVITAAEWEEYLSRRETRRVNRTSERSPYLLSGLIRCSCGSRMNAGQFGADRKPKYRCKASADKQTHSGGYVMTDYVERAVFEWLTEVAADVDAAAGQAAKMTKQTKAAGDQSAKIARQLLKLDARLDQLTNKMLDGTIPQATYERLRDENLDQRKTLEKALHDASTTVSKPAAIIAPELLKAWPVLPVESRRDILSRLIEYVEVSPGRPRAKVVVRPRW

SEQ ID NO: 2671 - protein, 464 aa, Artificial Sequence
  Description of Artificial Sequence: Synthetic polypeptide
MSSRYEGRRAVIYTRVSKDRAGGRSVAEQEAECRIVCQREGWSVADVLSDNDVGASRWSKGDRPNYDRLSRILQPGDVLVTWEASRAQRDLAAYNDLRQLCTERDVLWCYSGRVFDLTRSDDRFMTLLDIGLAEKEVDQTRERIMRTLRANLQAGKPHGIRPYGYRSIRDPDTGKPIGREPDPVEGPIVRGIVDRFLSGVPLRRIAIDLNASGVKPQRAEEWTASLLGKMLQKPAYAGLLTHHGEIVGPGTWPAIITEDEHYRIMAILKDPARRTQRGTSPKSLVTNIAVCGKCGSTVRRKTKAGRTVYVCRDIGCVTMTASDVDEYVEEWMFKLLSDPRVHRRVSQQGDSKASADALAKIDGIRARMDEYAVEAAKGDISPRAFALMEKQWLTEIAELEQVANQALIHPRLADLTGPYVEAVWADMDLDLQRDIVRSTLEVTLYPQKLQREQDKPPIEVLWRT

SEQ ID NO: 2672 - protein, 464 aa, Artificial Sequence
  Description of Artificial Sequence: Synthetic polypeptide
MKRAALYIRVSTMEQAKEGYSIPAQTDKLKAFAKAKDMAVAKVYTDPGFSGAKMERPALQEMISDIQNKKIDVVLVYKLDRLSRSQKNTLYLIEDVFLKNNVDFISMQESFDTSTPFGRATIGMLSVFAQLERDTITERMHMGRTERAKQGYYHGSGIVPLGYDYVHGELIINDYEAQIIQEIYDLYVNQGKGQQYITKRMVAKYPDKVKTLTIVKYALTNPLYIGKISWDGKVYDGHHSPIIDKSMYDKAQEIIARMAQKGGEQHGNQLGLLLGITYCGKCGAKVFRYVSGGKKYRYNYYMCRSVKKMLPSLVKDWNCKQPSLRQEVVEKKVIDSLKSLDFKKIERELKQVENKTKSKITTINNQISKKHNEKQKILDLYQYGTFDVTMLNERMKKIDNEINALTANIANLEGTKSESLINKLETLKTFNWETETTENKILIIKEFVERIELFDDEVIIKYKF

SEQ ID NO: 2673 - protein, 463 aa, Artificial Sequence
  Description of Artificial Sequence: Synthetic polypeptide
MRVAIYVRVSTDEQAKEGFSIPAQRERLRAFCESQGWEIVQEYIEEGWSAKDLNRPQMQRLLKDIKKGNIDIVLVYRLDRLTRSVLDLYLLLQTFEKYNVAFRSATEVYDTSTAMGRLFITLVAALAQWERENLAERVKFGIEQMIDEGKKPGGHSPYGYKFDKDFNCTIIEDEANTVRMIYRMYCDGYGYRSIADRLNELGVKPRIAKEWNHNSVRDILTNDIYIGTYRWGNKVVLNNHPPIISESLFRKAQKEREKRGVDRTRVGKFLLTGLLYCGNCDGHKMQGSFDKREQKTYYRCLKCNRITNEKNILEPLLDEIQLLITSKEYFMSKFTDQYDHQEMIDVSALTKELEKIKRQKEKWYDLYIDENNPIPKEELFAKINELNKKEEEIYSKLSEVELEDKEPVEEKYNRLSKMLDFKKQFEQANFFTKKELLLSIFERVVIYREKGKFKKITLDYTLK

SEQ ID NO: 2674 - protein, 463 aa, Artificial Sequence
  Description of Artificial Sequence: Synthetic polypeptide
MKVAIYTRVSSAEQANEGYSIHEQKRKLISFCEVNDWDRYEVFSDPGVSGGSMKRPSLQKLFDRLEEFDLVLVYKLDRLTRNVRDLLEMLEVFEKNNIAFKSATELFDTTSAIGKLFITMVGAMAEWERETIRERSLIGARAAVRSGKYIKVQPFCYDLVDQKLKPNQYAEYIRFIVDKLLSGKSANEVVRLLESKKKPPGITKWNRKTVLGWMRNPILRGHTKHGDLLIKNTHEPIISEDEHSKMLDIIDKRTHKSKTKHNSIFRGVIECPQCQNKLYLVSSIQKRANGGSYEVRRYTCATCHKNKEVKDVSFNESEIEREFINTLLKKGTDNFMVNIPKPKDYDIENNKEKILEQRANYTRAWSLGYIKDEEYFVLMDETDKLLKDIEEKESPRINIELNEQQIRSVKNLLIKGFKMATAENKEELITSTVDLIKIDFIPRRLNKEGNINTVKINEIHFKY

SEQ ID NO: 2675 - protein, 463 aa, Artificial Sequence
  Description of Artificial Sequence: Synthetic polypeptide
MRAIIYCRVSSDPHARGKSVSEQEVDCRATAKAHGWDVGEVLVDNDRGASRYSRKDRPAYRRLAEILSPGDVLVTWEASRAQRDLSAYLQLRDLCAERGVLWSYSGRTYDLARGDDRFTTGLDALLSEKEVEVTRERVLRSMRANAAAGRPHGKLPYAYMIIRDPHTGRTLDRVANPDTAPTFREAVQRVLDGDSLYAVCQDFNARGVPAPRPRRDGTPAKWIPVTLRKILESPTYAGLRSHNGEVIGEATWEPLISREEHERLKALFADPHRLTHRGSEPQWLLAGIARCGVCGATVKRIKSRGIQTYTCRSGFCAARMVTTVDDYVTEAVMRRIEGQDLVGQIDSDNAEYAAAVDAVRALRQRLDSFTDAAAEGEVTPAALARIEAKLLPQIERAEGRVRALAHSPAVAKIAGTGARERWEALTVRDRRDLVRALVDVQIHRVGKGRRNVPIGEGIGLTWL

SEQ ID NO: 2676 - protein, 463 aa, Artificial Sequence
  Description of Artificial Sequence: Synthetic polypeptide
MRAIIYCRVSSDPHARGKSVTEQEADCRATSKAHGWDIGEVLVDNDRGASRYSRKDRPAYRRLAETLAPGDVLVTWEASRAQRDLSAYLQLRDLCAERGVLWSYSGRTYDLARGDDRFTTGLDALLSEKEVEVTRERVLRSMRANAAAGRPHGKLPYGYMIVRDPHTGKTLDRVANPDTAPTFREAVQRVLDGDSLYAVCQDFNARGVPAPRPRRDGTPAKWIPVTLRKILESPTYAGLRLSNGEVIGQATWEPLISMEEHERLKALFADPHRLTHRGSEPQWLLAGIARCGVCGATVKRIKSRGVQTYTCRDGFCAARMVTTVEDYVVEAMMRRLEGQDLVGQIDSDNAEYASAVEAVRALRQRLDSFTDAAADGEVTPAALARIEAKLLPQIERAEGRVRALAHSPAVAKIAGAGARERWEALTVRDRRDLVRALVDVQIHRVGKGRRNVPIGEGIGLTWL

SEQ ID NO: 2677 - protein, 463 aa, Artificial Sequence
  Description of Artificial Sequence: Synthetic polypeptide
MVYLRQSEDRADDGLGVDRQREECMRLLTSRGWTLQREYVDNDVSATKSKPRPQFEEMMKAVDAGEVDVIVSRHLDRLLRRLAELERTLERCAPVGAAIITASDGIDTSTDGGRTTARILASVAQGEIERKSARQLSQARQAAKAGKWVGGRRPFGYEADGMTIRDCEADLVRQGYADILAGESLAEVARRWNTAGMTGPQYGKPWTFTTVREVLTNARHAGLRRHGPTQAEIRRNPEVGIVAKAEWPPLVDEMTWRAAVRIIADPSKRRGPTRGYGMLTGVCECGVCGAPVRRGTARRGIPAYKCETGKHVSRRCELVDMYVSGVVLRVLKRPDAVDLWTPERPDAADLLSKVDVLRSRIEDIGEDYADGLIDRAEFRAMRERAMSNLAEVEGMIAAAGATSPLSIVASADIDADWLAMSIAQKRALISALCTVVLLPAGQGARKFDTQTVVFRPRNPAVQM

SEQ ID NO: 2678 - protein, 463 aa, Artificial Sequence
  Description of Artificial Sequence: Synthetic polypeptide
MRAIIYCRVSSDPHARGKSVSEQEVDCRATAKAHGWDVGEVLVDNDRGASRYSRKDRPAYRRLAETLAPGDVLVTWEASRAQRDLSAYLQLRDLCAERGVLWSYSGRTYDLARGDDRFTTGLDALLSEKEVEVTRERVLRSMRANAAAGRPHGKLPYGYMIVRDPHTGRTLDRVANPDTAPTFREAVQRVLDGESLYAVCQDFNARDVPAPRPRRDGTPAKWIPVTLRKILESPTYAGLRSHNGEVIGEATWEPLISREEHERLKALFADPHRLTHRGSEPQWLLAGIARCGVCGATVKRIKSRGIQTYTCRAGFCAARMVTTVDDYVTEAVMRRLEGQDLVGQIDSDNSEYATAIDAVRALRQRLDSFTDAAAEGEVTPSALARIEAKLLPQIERAEGRVRALAHSPAVAKIAGTGARERWEALTVRDRRDLVRALVDVQIFRVGKGRRNVPIGEGIGLTWL

SEQ ID NO: 2679 - protein, 463 aa, Artificial Sequence
  Description of Artificial Sequence: Synthetic polypeptide
MRAIIYCRVSSDPHARGKSVSEQEVDCRATAKAHGWDVGEVLVDNDRGASRYSRKDRPAYRRLTETLAPGDVLVTWEASRAQRDLSAYLQLRDLCAERGVLWSYSGRTYDLARGDDRFTTGLDALLSEKEVEVTRERVLRSMRANAAAGRPHGKLPYGYMIVRDPHTGRTLDRVANPDTAPTFREAVQRVLDGESLYAVCQDFNARGVPAPRPRRDGTPAKWIPVTLRKILESPTYAGLRSHNGEVIGEATWEALISMEEHERLKALFADPHRLTHRGSEPQWLLAGIARCGVCGATVKRIKSRGIQTYTCRDGFCAARMVTTVEDYVVEAMMRRLEGQDLVGQIDSDNVEYAAAVDAVRALRQRLDSFTDAAAEGEVTPAALARIEAKLLPQIERAEGRVRALAHSPAVAKIAGAGARERWDALAVRDRRDLVRALVDVQIHRVGKGRRNVPIGEGIGLTWL

SEQ ID NO: 2680 - protein, 463 aa, Artificial Sequence
  Description of Artificial Sequence: Synthetic polypeptide
MTVGIYIRVSTEEQVRDGFSISAQREKLKAYCVAQDWDKFKFYVDEGVSAKDTNRPQLSIMLDHIKKGLINTVLVYRLDRLTRSVMDLYKLLDTFDKYNCAFKSATEVYDTSTAMGRMFITIVAALAQWERENLGERVRMGQLEKARQGEYSAKAPFGFDKNEHSKLIINLEESKVVLDMVRKIEEGYSIRQLADHLDGYTKPIRGYKWHIRTVLDILSNHAMYGAIRWSNEIIENAHPGIIKKDRFMKVQQLLSSRQNFKKRKTTSIFIFQMKLLCPNCGNHLTCERVMYHRKKDNQDIEHNRYRCQACVLNKKKAFSSSEKKIEVSFLNYVEKYRFKQVPEFQTEDNEIDILKKQLSKVERQREKFQKAWSNDLMTDEEFANRMKETKQALESIKEKLKSLSPNKNEDIDDDVIKEIINNIKSNWSHLSSDEKKQFINMFIESIKIDKKDGVTEVLDIEFY

SEQ ID NO: 2681 - protein, 463 aa, Artificial Sequence
  Description of Artificial Sequence: Synthetic polypeptide
MTVGIYIRVSTEEQVRDGFSISAQREKLKAYCIAQDWNSFKFYVDEGISAKDTNRPQLNTMLEHIKQGLINTVLVYRLDRLTRSVMDLYKLLDTFDKYNCAFKSATEVYDTSTAMGRMFITIVAALAQWERENLGERVRMGQLEKARQGEYSAKAPFGFDKNEHSKLIINPEESKVVLDMVGKIEEGYSIRQLADHLDSYIKPIRGYKWHIRTILNILSNHAMYGAIRWSNEIIENAHPGIITKDRFMKVQQLLSSRQNFKKRKTTSIFIFQMKLLCPNCGNHLTCERVRYHRKKDNKDIEHNRYRCQACVLNKKKAFSSSETKIEKAFLDYIDDYRFTKVPEFKKEDDEKEILKKKLSKIERQREKFQKAWSNDLMTDEEFAERMKETKNTLEEIKSELNKLGLSQNEKIDSETVRRIVNDIKNKWSLLSSLEKKQFMNLFVKNIQLKKINEKNIVVNITFY

SEQ ID NO: 2682 - protein, 463 aa, Artificial Sequence
  Description of Artificial Sequence: Synthetic polypeptide
MRAIIYCRVSSDPHARGKSVSEQEVDCRATAKAHGWDVGEVLVDNDRGASRYSRKDRPAYRRLTETLAPGDVLVTWEASRAQRDLSAYLQLRDLCAERGVLWSYSGRTYDLARGDDRFTTGLDALLSEKEVEVTRERVLRSMRANAAAGRPHGKLPYGYMIVRDPHTGRTLDRVANPDTAPTFREAVQRVLDGDSLYAVCQDFNDRGVPAPRPRRDGTPAKWIPVTLRKILESPTYAGLRSHNGEVIGEATWEPLISREEHERLKALFADPHRLTHRGSEPQWLLAGIARCGVCGATVKRIKSRGIQTYTCRDGFCAARMVTTVEDYVVEAVMRRLEGQDLVGQIDSDNAEYATAVDAVRALRQRLDSFTDAAAEGEVTPAALARIEAKLLPQIERAEGRVRALAHSPAVAKIAGAGARERWEALAVRDRRDLVRALVDVEIHRVGKGRRNVPIGEGIGLTWL

SEQ ID NO: 2683 - protein, 463 aa, Artificial Sequence
  Description of Artificial Sequence: Synthetic polypeptide
MRAIIYCRVSSDPHARGKSVSEQEADCRATAKAHGWDVGEVLVDNDRGASRYSRKERPAYRRLAEILSPGDVLVTWEASRAQRDLSAYLQLRDLCSERGVLWSYSGRTYDLARGDDRFTTGLDALLSEKEVEVTRERVLRSMRANAAAGRPHGKLPYGYMIVRDPHTGQSIERVPNPDTAPTFREAAQRILDGESLYAVCNDFNDRGVPAPRPRRDGTPAKWIPVTLRKILESPTYAGLRWTHGEVIGPATWEPLISMEEHERLKALFADPNRLTHRGSEPQWLLAGIARCGVCGATVKRIKSRGVQTYMCRDKFCACRKVTTVEDYVVEAMMRRLEGQDLVGQIDSDNSEYAAAIDAVRALRQRLDSFTDAAAEGEVTPAALARIEAKLLPQIERAEGRVRALAHSPAVAKIAGTGARERWELLSVRDRRDLVRALVDVQIFRVGKGRRNVPIGEGIGLTWL

SEQ ID NO: 2684 - protein, 463 aa, Artificial Sequence
  Description of Artificial Sequence: Synthetic polypeptide
MRAIIYCRVSSDPHARGKSVSEQEVDCRATAKAHGWDVGEVLVDNDRGASRYSRKDRPAYRRLAETLAPGDVLVTWEASRAQRDLSAYLQLRDLCAERGVLWSYSGRTYDLARGDDRFTTGLDALLSEKEVEVTRERVLRSMRANAAAGRPHGKLPYGYMIVRDPHTGRTLDRVANPDTAPTFREAVQRVLDGESLYAVCQDFNARDVPAPRPRRDGTPAKWIPVTLRKILESPTYAGLRSHNGEVIGEATWEPLISREEHERLKALFADPHRLTHRGSEPQWLLAGIARCGVCGATVKRIKSRGIQTYTCRAGFCAARMVTTVDDYVTEAVMRRLEGQDLVGQIDSDNSEYATAIDAVRALRQRLDSFTDAAAEGEVTPSALARIEAKLLPQIERAEGRVRALAHSPAVAKIAGTGARERWDALTVRDRRDLVRALVDVQIFRVGKGRRNVPIGEGIGLTWL

SEQ ID NO: 2685 - protein, 463 aa, Artificial Sequence
  Description of Artificial Sequence: Synthetic polypeptide
MRAIIYCRVSSDPHARGKSVTEQEADCRATAKAHGWEIGEVLVDNDRGASRYSRKDRPAYRRLAEILAPGDVLVTWEASRAQRDLSAYLQLRDLCSERGVLWSYSGRTYDLARGEDRFTTGLDALLSEKEVEVTRERVLRSMRANAAAGRPHGKLPYGYMIVRDPHTGQSIERVPNPETAPTFREAAQRVLDGESLYAVCNDFNARGVPAPRPRRDGTPAKWIPVTLRKILESPTYAGLRWTHGEVIGPATWEPMISMEEHERLKALFADPHRLTHRGSEPQWLLAGIARCGVCGATVKRIKSRGSQTYTCRDGFCAARLVTTVDDYVTEAVMRRLEGQDLVGQIDSDNAEYAAAIDAVRALRQRLESFTDAAADGEVTPAALARIEAKLLPQIERAEGRVRALAHSPAVAKIAGTGARERWELLAVRDRRDLVRALVDVQIFRVGKGRRNVPIGEGIGLTWL

SEQ ID NO: 2686 - protein, 462 aa, Artificial Sequence
  Description of Artificial Sequence: Synthetic polypeptide
MGKSITVIPAKKVQTSVLHQDRKKIKVAAYCRVSTDQEEQLSSYENQVNYYREFISKHEDYELVDIYADEGISATNTKKRDAFNRLIQDCRAGKVDRILVKSISRFARNTLDCIKYVRELKELGVGVTFEKENIDSLDSKGEVLLTILSSLAQDESRSISENATWGIRKKFERGEVRVNTTKFMGYDKDENGRLIINPQQAETVKFIYEKFLEGYSPESIAKYLNDNEIPGWTGKANWYPSAIQKMLQNEKYKGDALLQKTFTVDFLTKKRVQNDGQVNQYYVENSHEAIIDEETWETVQLEMARRKTYRDEHQLKSYIMQSEDNPFTTKVFCGACGSAFGRKNWATSRGKRKVWQCNNRYRIKGVEGCYSSHLDEATLEQIFLKALELLSENIDLLDGKWEKILAENRLLDKHYSMALSDLLRQEQIDFNPSDMCRVLDHIRIGLDGEITVCLLEGTEVDL

SEQ ID NO: 2687 - protein, 462 aa, Artificial Sequence
  Description of Artificial Sequence: Synthetic polypeptide
MGKSITVIPAKKVQNIVQHQVRKKINVAAYCRVSTDQDEQLSSYENQVNYYRDYISKHEDYELVDIYADEGISATNTKKRDAFNRLIQDCRAGKVDRILVKSISRFARNTLDCIKYVRELKELGVGVTFEKENIDSLDSKGEVLLTILSSLAQDESRSISENATWGIRKKFERGEVRVNTTKFMGYDKDDNGRLIINPQQAETVKFIYEKFLEGYSPESIAKYLNDNEIPGWTGKANWYPSAIKKMLQNEKYKGDALLQKTFTVDFLTKKRVQNDGQVNQYYVENSHEAIIDKDTWELVQLELERRKAYREEHQLKSYIMQNDDNPFTTKVFCAECGSAFGRKNWATSRGKRKVWQCNNRYRVKGQIGCQNNHIDEETLEKAVVIAVELLSENVDLLHGKWNKILEENRPLEKHYCTKLAEMINKTSWEFDSYEMCQVLDSITISEDGQISVKFLEGTEVDL

SEQ ID NO: 2688 - protein, 462 aa, Artificial Sequence
  Description of Artificial Sequence: Synthetic polypeptide
MRAIIYCRVSSDPNARGKSVAEQESECRDTAASHGWTVGQVLIDNDRGASRYSRKDRPAYRKLNEILSPGDVLVTWEASRAQRDLQAYLQLRDLCSERGVLWCYSGRVYDLARGDDRFVTGLDALLSEKEVEQTRERVLRSVRANAAAGRPHGKLPYGYMIVRDPDTGQPMDRVPNPDTAPVVREIVTRVLAGESLYSLCRELNDRGIPGPRPKRDGSKSQWIPVTMRKIIESPTYAGLRTHQGQVVGRATWEPLVTMDEHERMKGLLADPRRLTQRGSEPRWLLSGIVRCGVCGSKMNRLKNRGCDSYVCKNGSHTSRKIETIDTYVTEAVIRRLEGQELVGQIDDDDAEYAAAVEAVRALQQRLDAFADSAADGELSPAALARVESRLRPQLEAAEARMRALVQSPVVAQMAGDGARERWERLDLHSRRELIRALVDIRIHQVGVGRRGLIGEGVEFTWL

SEQ ID NO: 2689 - protein, 462 aa, Artificial Sequence
  Description of Artificial Sequence: Synthetic polypeptide
MRAIIYCRVSSDPKMRERSVQEQEIDCRAVASANGWDVGEVLIDNDRGASRYSRGDRPAYRRLAEILQPGDVLVTWEASRAQRDLGAYLQLRTLCEQRGVPWSYAGKLHDLTRGDDRFVTGLDALLSEKEVEQTRERVLRSVRANAAAGRPHGKLPYGYMIVRDPDTGQPVDRVPNPDTAPIVREIVTRVLAGDSLYSLCRELNERGVPGPRPKRDGSKSQWIPVTMRKIIESPTYAGLRTHQGQIVGPATWEPLVTMDEHERVKGLLADPRRLTQRGSEPRWLLSGIVRCGVCGSKMNRLKNRGCDSYVCKNGSHTSRKIETIDAYVTEAVIRRLEGQELVGQIDDDDAEYAAAVEAVRALQQRLDAFADSAADGELSPAALARVESRLRPQLEAAEARMRALVQSPVVAQMAGDGARERWERLDLHSRRELIRALVDIRIHQVGIGRRGLIGEGVEFTWL

SEQ ID NO: 2690 - protein, 462 aa, Artificial Sequence
  Description of Artificial Sequence: Synthetic polypeptide
MGKSITVIPAKKVQTSVQHQVRKKVNVAAYCRVSTDQDEQLSSYENQVNYYRDYISKHEDYELVDIYADEGISATNTKKRDAFNRLIQDCRAGKVDRILVKSISRFARNTLDCIKYVRELKELGVGVTFEKENIDSLDSKGEVLLTILSSLAQDESRSISENATWGIRKKFERGEVRVNTTKFMGYDKDESGRLIINPQQAETVKFIYEKFLEGYSPESIAKYLNDNEIPGWTGKANWYPSAIQKMLQNEKYKGDALLQKTFTVDFLTKKRVQNDGQVNQYYVENSHEAIIDKDTWELVQLELDRRKDYREEHQLKAYIIQNDDNPFTTKVFCKACGSAFGRKNWTTSRGKRKVWQCNNRYRVKGQIGCQNNHIDEETLEKAVVMAVELLSENVDLLHGKWNKILEENRPLEKYYSMKLAGIINKPSWEFDSYEMCQVLDSITISEDEQISVNFLEGTEVDL

SEQ ID NO: 2691 - protein, 461 aa, Artificial Sequence
  Description of Artificial Sequence: Synthetic polypeptide
MKVAIYTRVSTLEQKEKGHSIEEQERKLRAYSDINDWKIHKVYTDAGYSGAKKDRPALQEMLNEIDNFDLVLVYKLDRLTRSVKDLLEILELFENKNVLFRSATEVYDTTSAMGRLFVTLVGAMAEWERTTIQERTAMGRRASARKGLAKTVPPFYYDRVNDKFVPNEYKKVLRFAVEEAKKGTSLREITIKLNNSKYKAPLGKNWHRSVIGNALTSPVARGHLVFGDIFVENTHEAIISEEEYEEIKLRISEKTNSTIVKHNAIFRSKLLCPNCNQKLTLNTVKHTPKNKEVWYSKLYFCSNCKNTKNKNACNIDEGEVLKQFYNYLKQFDLTSYKIENQPKEIEDVGIDIEKLRKERARCQTLFIEGMMDKDEAFPIISRIDKEIHEYEKRKDNDKGKTFNYEKIKNFKYSLLNGWELMEDELKTEFIKMAIKNIHFEYVKGIKGKRQNSLKITGIEFY

SEQ ID NO: 2692 - protein, 461 aa, Artificial Sequence
  Description of Artificial Sequence: Synthetic polypeptide
MKVAIYTRVSTLEQKEKGHSIEEQERKLRAYSDINDWKIHKVYTDAGYSGAKKDRPALQEMLNEIDNFDLVLVYKLDRLTRSVKDLLEILELFENKNVLFRSATEVYDTTSAMGRLFETLVGAMAEWERTTIQERTAMGRRASARKGLAKTVPPFYYDRVNDKFVPNEYKKVLRFAVEEAKKGTSLREITIKLNNSKYKAPLGKNWHRSVIGNALTSPVARGHLVFGDIFVENTHEAIISEEEYEEIKLRISEKTNSTIVKHNAIFRSKLLCPNCNQKLTLNTVKHTPKNKEVWYSKLYFCSNCKNTKNKNACNIDEGEVLKQFYNYLKQFDLTSYKIENQPKEIEDVGIDIEKLRKERARCQTLFIEGMMDKDEAFPIISRIDKEIHEYEKRKDNDKGKTFNYEKIKNFKYSLLNGWELMEDELKTEFIKMAIKNIHFEYVKGIKGKRQNSLKITGIEFY

SEQ ID NO: 2693 - protein, 461 aa, Artificial Sequence
  Description of Artificial Sequence: Synthetic polypeptide
MKVAIYTRVSTLEQKEKGHSIEEQERKLRAYSDINDWKIHKVYTDAGYSGAKKDRPALQEMLNEIDNFDLILVYKLDRLTRSVKDLLEILELFENKNVSFRSATEVYDTTSAMGRLFVTLVGAMAEWERTTIQERTAMGRRASARKGLAKTVPPFYYDRVNDKFVPNEYKKVLRFAVEEAKKGTSLREITMKLNNSKYKAPLGKNWHRSVIRSALISPVARGHLVFGDIFVENTHEAIISEEEYKEIKQRISEKTNSTIVKHNAIFRSKLLCPNCNQKLTLNTVKHTPKNKEVWYSKLYFCVNCKNTKNKNACNIDEREVLKQFYNYLKQFDLTSYKTKNQPKETEDVGIDIEKLRKERARCQTLFIEGMMNKDEAFPIISRIDQEIRDYENRKSDNKSKSFDYEKIKNFKYSLLNGWELMEDELKTEFIKMAIKNIHFEYVRGIKGKRQNSLRITGIEFY

SEQ ID NO: 2694 - protein, 461 aa, Artificial Sequence
  Description of Artificial Sequence: Synthetic polypeptide
MNVAIYCRVSTLEQKEHGYSIEEQERKLKQFCEINDWNVADVFVDAGFSGAKRDRPELQRMMNDIKRFDLILVYKLDRLTRNVRDLLDLLEIFEQNNVAFRSATEVYDTSTAMGRLFVTLVGAMAEWERETIRERTQMGKLAALKKGIMLTTPPFYYDRVDNKFVPNKYKEIVLFAYEEALKGKSAKSIARKLNNSDIPPPNNRKWEDRSITRALRSPFTRGHFEWGGVYLENNHEPIITEEMYEKVKDRLEERTNTKKVKHTSIFRSKLVCPTCHNKLTMNTHKVTLKDRVYYNKHYYCNNCKETPNVKPVYIRAEEVERVFYEYLQHQDLTQYEVVEDTEEKEVAIDINKVMQQRKRYHKLYANGLMNEDELAELIEETDAAIEEYKKQNENKEVKQYSDEDITEYKSLLLEMWEISSDEEKAEFIQMAIKNIFIEYVLGKNDNKKKRRSLKIKDIEFY

SEQ ID NO: 2695 - protein, 461 aa, Artificial Sequence
  Description of Artificial Sequence: Synthetic polypeptide
MNVAIYCRVSTLEQKEHGYSIEEQERKLKSFCEINDWTVSDVFVDAGFSGAKRDRPELQRMMNNIKRFDLVLVYKLDRLTRNVRDLLDLLEIFEQNNVAFRSATEVYDTSTAMGRLFVTLVGAMAEWERETIRERTQMGKLAALKKGIMLTTPPFYYDRVDNKFVPNKYKEVVLFAYEEALKGKSAKSIARKLNNSDIEPPNNRKWEDRSITRALRSPFTRGHFEWGGVYLENNHEPIITEEMYEKVKDRLEERTNTKKIKHVSIFRSKLVCPTCHNKLTMNTHKVNLKDRVYYNKHYYCNNCKETPNLKPVYIRAEEVERVFYEYLQHKDLTQYEVVEDTEEKEVAIDINKVMQQRKRYHKLYANGLMNEDELAELIEETDAAIEEYKKQNENKEVKQYSDEDITEYKSLLLEMWDISSDEEKAEFIQMAIKNIFIEYVLGKNDNKKKRRSLKIKDIEFY

SEQ ID NO: 2696 - protein, 460 aa, Artificial Sequence
  Description of Artificial Sequence: Synthetic polypeptide
MKCAIYRRVSTDEQAEKGFSLENQLLRLQAFAESQGWEVVHDYMDDGYSGKNMNRPQIKRMLHDLKSNKFDIVLVYRLDRFTRSVKDLNDLLEVFKEHEVDFKSATESIDTATATGRMILNMMVSTAQWERETISERVKDVVRKKKDLGLISTGYPPYGYAMNDGVISQVPHEVEIVKFVFEKAKVYGFQKISKLLNEQGLVTRNGTKWLISTASRIAHNPFYSGEMRYKRDGETSTVPINVEGYEPVITKEEHKEVLKAIKKRNRNQTRAKSNEVYPFSGIVLCPECGHPMKGTRVSSRGYYYKYYRCDRASDHFCNGKLIRYEKLDKAFAEYIHDAFQIDRIEIKEETNTKDIQREIKRCKSKIERLKDLYVDGDISKKKYKNDVGELNEKIYDLEQKLLSAENKISHDHIRENLKRLSEFWGLIDDNTKMESIRGVFDTITVEIQGNDVVITDHTLL

SEQ ID NO: 2697 - protein, 460 aa, Artificial Sequence
  Description of Artificial Sequence: Synthetic polypeptide
MKKVKRTALYIRVSTTEQAQEGYSIGEQKERLEQYVKAMGWIISGEYIDPGFSGSNTDRPALNKLIDEINQHDIVLVYKLDRLSRSQKDTMLLIEDVFLKNDVDFVSMSESFDTSTPFGRAAIGLLATFAQLERENIKERMTMGMRGRAKKGYWKGTNRPPIGYDYIDGNLIINDYEAMQIRELYSIAANGIPGMNYNVRNMARYLSEKYTNKYGNWSDHSGISYTIHNKVYIGFVKYNDDFYPGQHQPIVDNKLFEKANARLDSYLSQFGEHVTYNKYMLSGITYCGICGKPYYRRNSQTKLNGIKKEYGYYSCEGRKSNVQNKCPSKIFQQKELEQSVVNQIQKLKYHDFKSETIQDNTSILLNQVKALDIKQERLIDLYSIGSISKDQINDRIKALNSEREKIKTLLSRPKKLNTSEILSISSQIEESDYSTKCDMVHTLVDKVIIDGNQTRIYWRF

SEQ ID NO: 2698 - protein, 459 aa, Artificial Sequence
  Description of Artificial Sequence: Synthetic polypeptide
MTEIASTKARKRCAVYCRVSSDERLDQEFNSIDAQKEAGHAFIASQRAEGWIAVADDYDDPGYSGGNTERPALKRLMADIQRGLIDIVVVYKIDRLTRSLADFSKMVEVFERQGVSFVSVTQQFNTTTSMGRLTLNILLSFAQFEREVTGERIRDKIAAAKKKGLWMGGVPPLGYDVANRQLVINEAEAAVVRRIFEEMLSIGSPTQIAARLTAEGITTKAWTTQDGRVRTGTRIDKKYIHKVLRNRIYLGELSSRGQWYPGVHEPIIERQLWDQVHAVLARDSHARSVETKIRSRTDALLRGLLYAPSGERMYPTYSRKNGRKYHYYVSKSESRFGAPGKSYERLPAGEIEAAVVAQIRTVLTSPESIAAVVRHVQRQGAPIDEATVVMAMGRLNDVWDQLFPVEQHRIANLMIERIDLVHTAEMQGIRVKWRELGWDALIGEFAPRSIGAELLEVEA

SEQ ID NO: 2699 - protein, 458 aa, Artificial Sequence
  Description of Artificial Sequence: Synthetic polypeptide
MKVAIYTRVSTLEQKEKGHSIEEQERKLRAYSDINDWTIQGVYVDAGYSGAKTDRPELNRLKENLSKIDLVLVYKLDRLTRNVKDLLDLLEIFERENVSFRSATEVYDTSTAMGRLFVTLVGAMAEWERETIRERAMMGKQAAIRKGMILTPPPFYYDRVDNKYIPNKYKDVVVWAYEEVKKGNSAKGIARKLNASDIPPPNGIQWEDRTITRALRSPLSKGHYFWGDIFIENSHEPIITDEMYNEIKERLNERVNAKTITHTSVFRGKLICPNCNGRLCLNTSYRKLKRGDVIHKNYYCNNCKVNKSGAFSFTEKEALKVFYDYLSKLDLSKYKAKEKEDKKIVTIDINKVMEQRKRYHKLYANGMMQEEELFELIKETDEKISEYEKQKERVPKKRLDVSKIKNFKNILLDSWNAFTLEDKEDFIKMAIKSIEIEYIHVKRGKTKHSIKIKNIDFY

SEQ ID NO: 2700 - protein, 458 aa, Artificial Sequence
  Description of Artificial Sequence: Synthetic polypeptide
MNYERSYLRSCQVSTLEQKEHGYSIEEQERKLKSFCEINDWSVSDVFIDAGFSGAKRDRPELQRMMNDIKRFDLVLVYKLDRLTRNVRDLLDLLEVFEQNNVAFRSATEVYDTSTAMGRLFVTLVGAMAEWERETIRERVMMGKRAAIKQGMILTPPPFYYDRVDNTYIPNDYKKVVLWAYDEVMKGNSSKAIARKLNDSDIPPPNGKRWEDRTITRALRNPITRGHYTWGDVFIENSHEPIITEEMYQQIKERLEERINTKIVSHVSVFRGKFICPRCGGTLTMNTATRKRKKGYVTYKTYYCNTCKTKKQSFGFSENEALRVFRDYLSKLDLDKYEVKTKQKDDVVTIDIDKIMEQRKRYHKLYAKGLMQEEELFELIKETDETIAEYEKQKELVPRKSLDIDKIKKFKNALLESWKIFSLEDKADFIKMAIKSIDIDYVKLKNRHSIKINDIEFY

SEQ ID NO: 2701 - protein, 458 aa, Artificial Sequence
  Description of Artificial Sequence: Synthetic polypeptide
MNYERSYLRSCQVSTLEQKEHGYSIEEQERKLKSFCKINDWSVSDVFIDAGFSGAKRDRPELQRMMNDIKRFDLVLVYKLDRLTRNVRDLLDLLEVFEQNNVAFRSATEVYDTSTAMGRLFVTLVGAMAEWERETIRERVMMGKRAAIKQGMILTPPPFYYDRVDNTYIPNDYKKVVLWAYDEVMKGNSSKAIARKLNDSDIPPPNGKRWEDRTITRALRSPITRGHYTWGDVFIENSHEPIITEEMYQQIKERLEERINTKIVSHVSVFRGKFICPRCGGTLTLNTVTRKRKKGYVTYKTYYCNTCKAKKESFGFSENEALRVFRDYLSELDLDKYKVKTKQNDDVVTIDIDKIMEQRKRYHKLYAKGLMQEEELFELIKETDETIAEYEKQKELVPRKSLDIDKIKKFKNALLESWEIFSLEDKADFIKMAIKSIDIEYVKLKNRHSIKINDIEFY

SEQ ID NO: 2702 - protein, 458 aa, Artificial Sequence
  Description of Artificial Sequence: Synthetic polypeptide
MNYERSYLRSCQVSTLEQKEHGYSIEEQERKLKSFCKINDWSVSDVFIDAGFSGAKRDRPELQRMMNDIKRFDLVLVYKLDRLTRNVRDLLDLLEVFEQNNVAFRSATEVYDTSTAMGRLFVTLVGAMAEWERETIRERVMMGKRAAIKQGMILTPPPFYYDRVDNTYIPNDYKKVVLWAYDEVMKGNSSKAIARKLNDSDIPPPNGKRWEDRTITRALRNPITRGHYTWGDVFIENSHEPIITEEMYQQIKERLEERINTKIVSHVSVFRGKFICPRCGGTLTMNTATRKRKKGYVTYKTYYCNTCKTKKQSFGFSENEALRVFRDYLSKLDLDKYEVKTKQKDDVVTIDIDKIMEQRKRYHKLYAKGLMQEEELFELIKETDETIAEYEKQKELVPRKSLDIDKIKKFKNALLESWKIFSLEDKADFIKMAIKSIDIDYVKLKNRHSIKINDIEFY

SEQ ID NO: 2703 - protein, 458 aa, Artificial Sequence
  Description of Artificial Sequence: Synthetic polypeptide
MNYERSYLRSCQVSTLEQKEHGYSIEEQERKLKSFCEINDWSVSDVFIDAGFSGAKRDRPELQRMMKDIKKFDLVLVYKLDRLTRNVRDLLDLLEIFEQNNVAFRSATEVYDTSTAMGRLFVTLVGAMAEWERETIRERVMMGKRAAIKQGMILTPPPFYYDRVDNTYIPNDYKKVVLWAYDEVMKSNSSKAIARKLNDSDIPPPNGKRWEDRTITRALRSPITRGHYTWGDVFIENSHEPIITEEMYQQIKERLEERINTKIVSHVSVFRGKFICPRCGGTLTLNTTTRKRKKGYVTYKTYYCNTCKGKKESFGFAENEALRVFHDYLSKLDLEKYKVKTKQKDNVVTIDIDKIMEQRKRYHKLYAKGLMQEEELFELIKETDETIAEYEKQKELAPRKMLNVDKIKKFKSVLLESWEIFSLEDRADFIKMAIKSIDIEYVKLKNRHSIEIKDIEFY

SEQ ID NO: 2704 - protein, 458 aa, Artificial Sequence
  Description of Artificial Sequence: Synthetic polypeptide
MNYERSYLRSCQVSTLEQKEHGYSIEEQERKLKSFCEINDWSVSDVFIDAGFSGAKRERPELQRMMKDIKRFDLVLVYKLDRLTRNVRDLLDLLEIFEQNNVAFRSATEVYDTSTAMGRLFVTLVGAMAEWERETIRERVMMGKRAAIKQGMILTPPPFYYDRVDNTYIPNDYKKVVLWAYDEVLKGVSSKAIARKLNDSDIPPPNGKKWEDRTITRALRSPIARGHYTWGDVFIENSHEPIITEEMYQQIKERLEERINTKIVSHVSVFRGKFICPKCGGTLTLNTVTRKRKKGYVTYKTYYCNTCKTRKQSFGFAENEALRVFRDYLSKLDLEKYKVKTKQKDDVVTIDIDKIMEQRKRYHKLYAKGLMQEEELFELIKETDETIAEYEKQKELVPRKSLDIDKIKKFKNALLESWKIFSLEDKADFIKMAIKSIDIDYVKLKNRHSIKINDIEFY

SEQ ID NO: 2705 - protein, 458 aa, Artificial Sequence
  Description of Artificial Sequence: Synthetic polypeptide
MNYERSYLRSCQVSTLEQKEHGYSIEEQERKLKSFCEINDWSISDVFIDAGFSGAKRDRPELQRMMKDIKRFDLVLVYKLDRLTRNVRDLLDLLEIFEQNNVAFRSATEVYDTSTAMGRLFVTLVGAMAEWERETIRERVMMGKRAAIKQGMILTPPPFYYDRVDNTYIPNDYKKVVLWAYDEVLKGVSSKGIARKLNDSDIPPPNGKRWEDRTITRALRSPITRGHYTWGDVFIENSHEPIITEEMYQQIKERLEERINTKIVSHVSVFRGKFICPRCGGTLTMNTATRKRKKGYVTYKTYYCNTCKGKKESFGFAENEALRVFRDYLSKLDLDKYEVKTKQKDDVVTIDIDKVMEQRKRYHKLYAKGLMQEEELFELIKETDETIAEYEKQKELVPRKTLDVDKIKKFKNVLLESWKIFSSEDKADFIKMAIKSIDIEYVKFKNRHSIKINDIEFY

SEQ ID NO: 2706 - protein, 458 aa, Artificial Sequence
  Description of Artificial Sequence: Synthetic polypeptide
MNYERSYLRSCQVSTLEQKEHGYSIEEQERKLKSFCEINDWSVSDVFIDAGFSGAKRERPELQRMMKDIKRFDLVLVYKLDRLTRNVRDLLDLLEIFEQNNVAFRSATEVYDTSTAMGRLFVTLVGAMAEWERETIRERVMMGKRAAIKQGMILTPPPFYYDRVDNTYIPNDYKKVVLWAYDEVLKGVSSKAIARKLNDSDIPPPNGKKWEDRTITRALRSPIARGHYTWGDVFIENSHEPIITEEMYQQIKERLEERINTKIVSHVSVFRGKFICPKCGGTLTLNTVTRKRKKGYVTYKTYYCNTCKTRKQSFGFAENEALRVFRDYLSKLDLEKYKVKTKQKDDVVTIDIDKIMEQRKRYHKLYAKGLMQEEELFELIKETDETIAEYEKQKELVPRKTLDIDKIKKFKNVLLESWEIFSLEDKADFIKMAIKSIDIEYVKLKNRHSIKINDIEFY

SEQ ID NO: 2707 - protein, 456 aa, Artificial Sequence
  Description of Artificial Sequence: Synthetic polypeptide
MADQLETARKFSADRGYDVVAEHSDNDISAFRGADRPGYQRVLKLARERKIDRVIVYQLTRMTRNRGERAEFIDAFHACKVNVSEAQGGDYDLSTAAGRSWVDIQGALATWESEIKSERVTAAAARRARSGRPSGDLGYGWIKHGTGASATWTEHPHEAEVVREIVDRLLAGETLRGITQSLNDRGEPAPKSASWGKTSVKKLALRESNVALRIHHRGQADEERFDGCWPALVDRAKHEKVGALLREPARQTNGTKRPGARKHLLSWGIGECGVCGGMLRVATKRGRYGRPLDLYVCDANNGCVGRSEPAVDNLVKTVAIKRLSRPDALEWLLGDDDEARRWAERVDELNRRLADAADAFADGAITGEQLRRITAKLQPDLDDALERARESAGALNVDVLRPLAGPEAAQRWDDMEMAQRRAVLEALGLRVIIDRTRRGPGFDPSSVRFVWGRSAD

SEQ ID NO: 2708 - protein, 455 aa, Artificial Sequence
  Description of Artificial Sequence: Synthetic polypeptide
MANEIKQVALYIRVSTDQQAKHGDSLDEQQHTLNEYVRQQGNMRVFKTYIDDGISGQKLYRDEFQKLLDDVKKGKIDTILFTKLDRWFRNLRHYLNIQEILDKNNVTWLAVTQPFFNTETAMGRSFVNQSMGFAELEAQMTSERIRAVFDNKIRKGEVVSGKVPLGYDIKDKHLVPNEKAEIVKEIFQYYLETGSMRATVRHLENHFSMTRDYQSVRQMLTNRKYIGELRDNKNFCEPIIDRDVFERVQLQLSKNIRMNKKRDYMFTGLLVCSECGCNYSATAVISRYVRKDGTTNPNERHLYRCTKNRNNVKKCSNKKGIYETTLENFLLENIEKQAEELSVKMQQESEVKKTKNTNDKIKKKIDRLKKAYLNEVITLEEYKKDREELEALLIPEQDNKISKIDLNSLHNYSTAEFRDGYKQLTVSEKSSLWRQVIKNIVVYPDGNLKINFLGY

SEQ ID NO: 2709 - protein, 455 aa, Artificial Sequence
  Description of Artificial Sequence: Synthetic polypeptide
MSGSHNIKLTLEQRQKLVRMHSEGTTVVDLAEQFGVSRPTVYNVLEKMGKTNHKKIDFYVDKKSENKEEMNPSPTILDEIKTTNFLGITIDTEGGTSNPKIRKTLDKSFKLLDVVEFVKVTKFKLNTVMFDYFWQVVVGKSRLHVSTAVLEWFGYLGEYRKQKEAFLKILRRNEISYRELTKKDKEIELYPTIKEELQTVNEGAQACSKFLIMEPDDLKMAIMQLKTKNGHTIRQYYIDLEKLLKMYTEYTLYFNHREAQRKITGLEEMMVKMDLERKQEREVDRQLILRQEQYMRSLGISLEEVKDQNEELLDNNKGLKKNVKGLRSEVKDVKRKLGIAVEDRAPLPVDEEIQERFVLIKRNDEQHYQYYTIRAQHGYTERRIKIQRVLFPQLEILLDFKANPNSKSLYNRIKKELKIKSVQFSGNNIDLEGSEVIEEELIEEMKVINDQKYNI

SEQ ID NO: 2710 - protein, 455 aa, Artificial Sequence
  Description of Artificial Sequence: Synthetic polypeptide
MKCAIYRRVSTDEQAEKGFSLENQLLRLQAFAESQGWEVVHDYMDDGYSGKNMNRPQIKRMLHDLKSNKFDIVLVYRLDRFTRSVKDLNDLLEVFKEHEVDFKSATESIDTATATGRMILNMMVSTAQWERETISERVKDVVRKKKDLGLISTGYPPYGYAMNDGVISQVPHEVEIVKFVFEKAKVYGFQKISKLLNEQGLVTRNGTKWLISTASRIAHNPFYSGEMRYKRDGETSTVPINVEGYEPVITKEEHKEVLKAIKKRNRNQTRAKSNEVYPFSGIVLCPECGHPMKGTRVSSRGYYYKYYRCDRASDHFCNGKLIRYEKLDKAFAEYIHDAFQIDRIEIKEETNTKDIQREIKRCKSKIERLKDLYVDGDISKKKYKNDVGELNEKIYDLEQKLLSAENKISHDHIRENLKRLSEFWGLIDDNTKMESIRGVFDTITVENTRERRLYH

SEQ ID NO: 2711 - protein, 453 aa, Artificial Sequence
  Description of Artificial Sequence: Synthetic polypeptide
MTKAAIYIRVSTQDQVENYSIEVQRERIRAYCTAKGWDIYDEYIDGGYSGSNLDRPDIKRLLNDLKKIDVVVVYKLDRLSRSQRDTLELIEEHFLKNNVDFVSITETLDTSTPFGKAMIGILSVFAQLERETIAERMRMGHIKRAENGLRGNGGDYDPSGYTRVDGHLILKPDEAKHIKRAFDLYEQYHSITRVQEVLKEEGYTVWRFRRYRDILSNILYIGRVTFSGKEYKGQHEPIISSEQFKRVQVLLKRHKGHNAHKAKQSLLSGLITCSCCGEKYVAYSTGKSKDVESKRYYYYICRAKRFPSEYDERCMNKTWSRKKLEEVIFDELKNLTVKQSVSQKKEKKINYEKLIKDIDKKMERLLDLFTNTTNISRQLLETKMDKLNSEKEHLILKQQSYEQEFSISKDMITTINESLETMDFRAKQVMINTFIQEIHIDHDVVDIIWRWRF

SEQ ID NO: 2712 - protein, 452 aa, Artificial Sequence
  Description of Artificial Sequence: Synthetic polypeptide
MLRVALYIRVSTEEQALNGDSIRTQIEALEQYSKENDFNIVGKYIDEGCSATNLKRPNLQRLLRDVEKDKVDLVLMTKIDRLSRGVKNYYKIMETLEKHKCDWKTILENYDSSTAAGRLHINIMLSVAENEAAQTSERIKFVFQDKLRRKEVISGTIPIGYKIENKHLVIDKEKKYIVKAIFDEYEKSGSVRTLIETINNLHGELYSYNKIKNILRNELYIGIYNKRGFYVEDYCEPIISKKQFKQIQRILEKNKKTTPNKNIHYHIFSGLLKCKECGYTLKGNSSNVGEKLYLSYRCSTFYLNKNCVHNVTHNEKHIENYLLTNLKPQLHKHMVKLEAQNEKIRRNKKSNKKDEKKKIMKKLDKIKDLYLEDLIDKETYRKDYEKLQSQLDNITEEQESQIIDTSHIKKFLDIDINEMYSDLSRVERRRFWLSIIDYIEIDNNKNITINFI

SEQ ID NO: 2713 - protein, 452 aa, Artificial Sequence
  Description of Artificial Sequence: Synthetic polypeptide
MKAAIYIRVSTQEQVENYSIQAQTEKLTALCRSKDWDVYDIFIDGGYSGSNMNRPALNEMLSKLHEIDAVVVYRLDRLSRSQRDTITLIEEYFLKNNVEFVSLSETLDTSSPFGRAMIGILSVFAQLERETIRDRMVMGKIKRIEAGLPLTTAKGRTFGYDVIDTKLYINEEEAKQLQLIYDIFEEEQSITFLQKRLKKLGFKVRTYNRYNNWLTNDLYCGYVSYKDKVHVKGIHEPIISEEQFYRVQEIFTRMGKNPNMNRDSASLLNNLVVCSKCGLGFVHRRKDTMSRGKKYHYRYYSCKTYKHTHELEKCGNKIWRADKLEELIINRVNNYSFASRNVDKEDELDSLNEKLKIEHAKKKRLFDLYINGSYEVSELDSMMNDIDAQINYYESQIEANEELKKNKKIQENLADLATVDFDSLEFREKQLYLKSLINKIYIDGEQVTIEWL

SEQ ID NO: 2714 - protein, 452 aa, Artificial Sequence
  Description of Artificial Sequence: Synthetic polypeptide
MKAAIYIRVSTQEQIENYSIQAQTEKLTALCRSKDWDVYDIFIDGGYSGSNMNRPALNEMLSKLHEIDAVVVYRLDRLSRSQRDTITLIEEYFLKNNVEFVSLSETLDTSSPFGRAMIGILSVFAQLERETIRDRMVMGKIKRIEAGLPLTTAKGRTFGYDVIDTKLYINEEEAKQLQMIYDIFEEEKSITTLQKRLKKLGFKVKSYSSYNNWLTNDLYCGYISYADKVHTKGVHEPIISEEQFYRVQEIFSRMGKNPNMNRDSASLLNNLVVCGKCGLGYVHRRKDTVSRGKKYHYRYYSCKTYKHTHELEKCGNKIWRADKLEELIIDRVNNYSFASRNVDKEDELDSLNEKLKTEHTKKKRLFDLYISGSYEVSELDAMMSDIDAQINYYEAQIEANEELKKNKKIQENLADLATVDFDSLEFREKQLYLKSLINKIYIDGEQVTIEWL

SEQ ID NO: 2715 - protein, 451 aa, Artificial Sequence
  Description of Artificial Sequence: Synthetic polypeptide
MTKAAIYIRVSTQDQIENYSIEVQRERIRAFCKAKNWDIYDEYIDGGYSGSNLERPGIKKLITDLKNIDAVVVLKLDRLSRSQRDTLELIEEHFLKNKVDFVSITETLDTSTPFGKAMIGILSVFAQLERETIAERMRMGHVKRAENGLRGNGGDYDPAGYTRKDGQLIIKEDEATHIKRVFDLYEQYYSITKVQEVLKEEGYPIWRFRRYRDILSNTLYIGRVTFSGKEYEGQHEPIVTSEQFKRVQTLLKRHKGHNAHKAKQSLLSGLIACSCCGENYVAYSTGKSKDTESKRYYYYICRAKRFPAEYEERCMNKTWSRKKLEEVVISELKSLTEEKKQTNKKEKKVNYEKLIKDIDKKMERLLDLFMNTTNISKNLLEQQMEKLNLEKEKLLLKQQRSEEESISHEVTLTAIDDAFETLDFKEKQVIINNFIEKIYINQNNVKIIWRF

SEQ ID NO: 2716 - protein, 450 aa, Artificial Sequence
  Description of Artificial Sequence: Synthetic polypeptide
MLEVCMKIAVYVRVSTLEQAESGYSIGEQTEKLTAYCRVKDWQVAKIYTDPGFSGSSLDRPAMQQLIGDCKLGVFDAVLVYKLDRLSRSQKDTLYLIEDVFNAYNIHFMSLSENFDTSTPFGKAMIGLLSVFAQLEREQIKERMQMGKLGRVKAGKISAWSNVPFGYTKVKDSYDVDPLRADIVRRIYADYLAGKSITKIMKELNREGHIGKGVAWSYRTVRQVLGNVTYTGRIIFKGQVYDGLHTGIISKADWDEVQRVLKIRQLDQARKSNNPRPFQARYMLSGLLKCHYCGATLAIAKSHTKNGPLWRYVCPTRHANKYHRNNAARYRIPPVNCELTYKYKDDLEEAVLREVKKVALDPDAVVASQDDGQPKIDKQAIKAQLAKIKRQQAKLVDLYLLSDDLMLTSFTIGPKSLKSKLMLSRHNLSMMPKRPTPLKRRRPMLHRLIS

SEQ ID NO: 2717 - protein, 450 aa, Artificial Sequence
  Description of Artificial Sequence: Synthetic polypeptide
METKPRLTVEQRTNVVKKYQDGCSVAEITREFKISRPTVYKILSKVNLTSKNEIFSEKEDGNKDMENTTFLGVNIDTINGPFDFKIKKALKRSLKLLNVVEFIKVTKFNLNLVMFDYFWQVVVGNRSTLVGRPVLEWFGYEGEYFKQRQNFKKMLRNNSIQYRELTQNDNEIELYPTVKQELQELNAGAQACAKFLIMEPDDLKMAIMQLKTKNGDTIRQYYIDLEKLLKLYVEYTLYFNHRESQRKITNLEEMMADMRLDMKEERKIREEDREKDRELIQQQTQYMRSLGISLEEVKDQNEELLDNNRGLKKEVKKVQYKLGIAVEDRAPLPVNEDKQERFILLKRNDNEHFQYYTIRAQHKYTERRIKVQKTLFPHLQILLDFMANPNSKSLYVRIKDTLKTKNVQFNGNNIDLEGSEVTEEELLEEMKVINDQKYKILKLSPKKVFD

SEQ ID NO: 2718 - protein, 449 aa, Artificial Sequence
  Description of Artificial Sequence: Synthetic polypeptide
MEITTGNKSRLTKEERQAVFQMRCNNVPITQIANKFKVSRPTIYSIIEMERKNQTKNDFFFEKEDLNKDMSNLISSEIKTTFLGVTIDTENGSSNPKINKALNTSLDLLDIVQFIKVTKFKINSVMFDYFWQVVVGNQCTLVGTVVLEWFGYEGEYRKQRQNFKKMLSNNNISYSELSYKDKEIELYPAIQEELQLLPHDGARACSKFLVMKPRDLKMAIMQLKTKNGHTIRDYYIDLEELLKMYTEYTLYFNHRKAQYKITNLEKMMVDLKLTNKNIEESNRRQEQYMRSLGISLEEVKDQNEILIEKSEILENQNNGLKKQNQNIQRKLGIAVEDRAPLPVDEKKQERFILIKRNDSEHFQYYTIRAQHGYTERRIKVQKTLFPHLQILLDFQANPNSKSLYTRIKDTLKAKNVQFSGNNIDLTESEVSEEELVEEMKVINDQRYNV

SEQ ID NO: 2719 - protein, 446 aa, Artificial Sequence
  Description of Artificial Sequence: Synthetic polypeptide
METVKPRLTLCDRTEVIKLYNGGVPVIKISEQFKVSRPTIYKIVEEVKKDQKKIDFFILKEDENKDIMEPNIENLKVNFLGIKIDPENGSEDPRINKALSKGHQLLDIMEFIKVTKFKLNMVMFDYFWQSVVGNRPSLMTMTIFQWFGYEGEYYTQKQNFKKMLKNNDIRYDELSINDDNIYQYAGIKEELQMISNKGARQNAKFIIMEPKNLKRAIMQLKTKNGHIIRDYYIDLEELLKLYVEYTLYFNHRTSQRKITNLEQMMAKMDLDREKDRELLLRQEQYMRSLGISLEEVKDQNEELLNNNKGLKKNVKGLRFEVRDVKRKLGIAVEDRAPLPVDEKKQERFVLIKRNDNEHYQYYTIQAQHGYTERRIKVQRVLFPHLQILLDFTANPNSKTLYVRIKDTLKAKNVQFSGNNIDLEGSEVTEEELIEEMKVTSESKRNI

SEQ ID NO: 2720 - protein, 446 aa, Artificial Sequence
  Description of Artificial Sequence: Synthetic polypeptide
MSGSVDPFDTPGLGPWLKRDRLDDWDILVAWKLDRIARRAIAINRVFHLCQEHDKTLVCISDNIDLSTWVGRLIANVIAGVAEGELEAIRERTLASHRKLRELGRWPGGRPAYGYKAVENENGPGWKLVHDEYSATIMREIVDRTLQGEAGNAIAQDLQARGVLPPAEYRRQMNGEKLRGGEWMGQVIRKMLKSRTLLGHVTHQQVTVINEKEGTPILKGEPLVSLEEWEELQAMLGGSSRPKNHNRSTGASPMLDVALCGECGKPLHLRTQRTERKTKVHVHRYYYCPDKHGQAIRAEIVERTVEEQFLDMFGDKPAMERVFREGENHEIEIKQAIQSIEALTPLLGAATSGTVLKSLTDQISAISNRVTYLESLPKAESGYILRATGKTYREEWESRDEQGRRSLLKRSGVTVTFLLQGKTRTTEGALQTEIKFPGDVEERLAS

SEQ ID NO: 2721 - protein, 444 aa, Artificial Sequence
  Description of Artificial Sequence: Synthetic polypeptide
MIRPRLTKEQRNEIVNLYTSGTPIVQLSRQFKVTRPTIYNVIESQGNTNHKKIDFYSEKVDENKDMSELNFTVKTDFLGVTIDTENGSSNPKINKALSASFQLLDIMEFVKVTKFKLNMTMFDYFWQVVVGNQSTLVGRLVLEWFGYDGEYFKQKQNFKKMLKNNNIQYHELTKDNKEIEQYPTFQQELQLLPHNGARTCSKFLIMQPKDLKMAIMQLKTKNGHIIREYYIDLEELLKLYTEYTLYFNHRESQRKITDLEQMMADLKVTNKNIEESNKKLEESNQRQEQYMRSLGISLEEVKDQNEELLDSNITLKQEVKKVQHKLGIAVKDRAPLPVDEDKQERFVLIKRNDPDYYPYYTIRAQEGYTNRKLRVEQLHFPNLEVLLDFKCNPNSKSLYTRIKENLKAEGVIFKGNNIDLEDSHTTEKEFIKKMKVINNQKLYV

SEQ ID NO: 2722 - protein, 444 aa, Artificial Sequence
  Description of Artificial Sequence: Synthetic polypeptide
MKRAVIYTRVSRDDTGEGQSNQRQERECRRLTDYKRLDVVAVEQDISVSAFSGKERPAWKRVLDMVRAGEVDYVIAYHMDRMTRSMTDLEELIVLCEEHGVGIATAVGEIDLTSDMGRMVARILAAVARAEVERKSARQKLANAQRAAEGKPHSGGQRPFGYARDHMTVVEDEAVLIKTGAERALAGEPLISISKDWGMTARGVKNVLTNPRYAGIRMYLGERVGEAEWPAILDLEVHLRLVEALTDPARTKGTVKMGRTPTSLLTGLAACSVCKGKVRGSSVRGRLTYACRSSHAHIDRADVDTLALGAVINRLSSPAWVETLAPAGDDRLAKAKLVAEEKREALKMYARLLASGAMDEEQFTEASRVARDAMKEAEQTLSQAADGAALSGLDLGTDRVEKQLLALPLARQRGIVEQLLTIEILPQVKSRLAPLSSVERVIIS

SEQ ID NO: 2723 - protein, 444 aa, Artificial Sequence
  Description of Artificial Sequence: Synthetic polypeptide
MQGSYKNKLTSEQRNTIVQMFNDGVPVFTLAKQFEISRPTVYNVLEKAGNTNHKKIEFYVGKSDKNKEEMEIISEKFENIILNGTNTPSKTNFLGITIDTENGSNNPKVRKALNASFNLLDITQFVKVTKFKLNMTMFDYFWQVVVGNTRVHLVSRVLEWFGYTGEIKEQRKNFIRMLKRNGIEYTELTQKDKEIELYPTIQEEVQLLPSNVTNSKFLIMEPDDLKMAIMQLKTKNGHIIRQYYIDLEKLLRVYTEYTLYFNHREATRKITDLEQTMRELKESNQRQEKYMRSLGIQLEDVKDQNEVLIDNNKDLKKEVKKVQHKLGIAVVDRAPLPLSEDKQERFVLIKRNDDEYYSYYTIRAQYKYTERRIKTQRLLFPNLEILLDFKANPNSKTLYTRIKEKLVGAGVLFEGNNIEIEGTKVTQDELIEEMKVTSNQKYNV

SEQ ID NO: 2724 - protein, 444 aa, Artificial Sequence
  Description of Artificial Sequence: Synthetic polypeptide
MKRAVIYTRVSRDDTGEGQSNQRQERECRRLTDYKRLDVVAVEQDISVSAFSGKERPAWKRVLDMVRAGEVDYVIAYHMDRMTRSMTDLEELIVLCEEHGVGIATAVGEIDLTSDMGRMVARILAAVARAEVERKSARQKLANAQRAAEGKPHSGGQRPFGYARDHMTVVEGEAVLIKTGAERALAGEPLISISKDWGMTARGVKNVLTNPRYAGIRMYLGERVGEAEWPAILDLEVHLRLVEALTDPARTKGTVKMGRTPTSLLTGLAACAVCKGKVRGSSVRGRLTYACRSSHAHIDRADVDTLALGAVINRLSSPAWVETLAPAGDDRLAKAKLVAEEKREALKMYARLLASGAMDEEQFTEASRVARDAMKEAEQTLSQAADGAALSGLDLGTDRVEKQLLALPLARQRGIVEQLLTIEILPQVKSRLAPLSSVERVIIS

SEQ ID NO: 2725 - protein, 444 aa, Artificial Sequence
  Description of Artificial Sequence: Synthetic polypeptide
MKRAVIYTRVSRDDTGEGQSNQRQERECRRLTDYKRLDVVAVEQDISVSAFSGKERPAWKRVLDMVRAGEVDYVIAYHMDRMTRSMTDLEELIVLCEEHGVGIATAVGEIDLTSDMGRMVARILAAVARAEVERKSARQKLANAQRAAEGKPHSGGQRPFGYARDHMTVVEDEAVLIKAGAERALAGEPLISISKDWGMTARGVKNVLTNPRYAGIRMYLGERVGEAEWPAILDLEVHLRLVEALTDPARTKGTVKMGRTPTSLLTGLAACSVCKGKVRGSSVRGRLTYACRSSHAHIDRADVDTLALGAVINRLSSPAWVETLAPAGDDRLAKAKLVAEEKREALKMYARLLASGAMDEEQFTEASRVARDAMKEAEQTLSQAADGAALSGLDLGTDRVEKQLLALPLARQRGIVEQLLTIEILPQVKSRLAPLSSAERVIIS

SEQ ID NO: 2726 - protein, 444 aa, Artificial Sequence
  Description of Artificial Sequence: Synthetic polypeptide
MKRAVIYTRVSRDDTGEGQSNQRQERECRRLTDYKRLDVVAVEQDISVSAFSGKERPAWKRVLDMVRAGEVDYVIAYHMDRMTRSMTDLEELIVLCEEHGVGIATAVGEIDLTSDMGRMVARILAAVARAEVERKSARQKLANAQRAAEGKPHSGGQRPFGYARDHMTVVEDEAVLIKTGAERALAGEPLISISKDWGMTARGVKNVLTNPRYAGIRMYLGERVGEAEWPAILDLEVHLRLVEALTDPARTKGTVKMGRTPTSLLTGLAACSVCKGKVRGSSVRGRLTYACRSSHAHIDRADVDTLALGAVINRLSSPAWVETLAPAGDDRLAKAKLVAEEKREALKMYARLLASGAMDEEQFTEASRVARDAMKEAEQTLSQAADGAALSGLDLGTDRVEKQLLALPLARQRGIVEQLLTIEILPQVKSRLAPLSSAERVIIS

SEQ ID NO: 2727 - protein, 440 aa, Artificial Sequence
  Description of Artificial Sequence: Synthetic polypeptide
MIYTRVSRDDTGEGQSNQRQERECRRLTDYKRLDVVAVEQDISVSAFSGKERPAWKRVLDMVRAGEVDYVIAYHMDRMTRSMTDLEELIVLCEEHGVGIATAVGEIDLTSDMGRMVARILAAVARAEVERKSARQKLANAQRAAEGKPHSGGQRPFGYARDHMTVVEDEAVLIKTGAERALAGEPLISISKDWGMTARGVKNVLTNPRYAGIRMYLGERVGEAEWPAILDLEVHLRLVEALTDPARTKGTVKMGRTPTSLLTGLAACSVCKGKVRGSSVRGRLTYACRSSHAHIDRADVDTLALGAVINRLSSPAWVETLAPAGDDRLAKAKLVAEEKREALKMYARLLASGAMDEEQFTEASRVARDAMKEAEQTLSQAADGAALSGLDLGTDRVEKQLLALPLARQRGIVEQLLTIEILPQVKSRLAPLSSAERVIIS

SEQ ID NO: 2728 - protein, 440 aa, Artificial Sequence
  Description of Artificial Sequence: Synthetic polypeptide
MIYTRVSRDDTGEGQSNQRQERECRRLTDYKRLDVVAVEQDISVSAFSGKERPAWKRVLDMVRAGEVDYVIAYHMDRMTRSMTDLEELIVLCEEHGVGIATAVGEIDLTSDMGRMVARILAAVARAEVERKSARQKLANAQRAAEGKPHSGGQRPFGYARDHMTVVEGEAVLIKTGAERALAGEPLISISKDWGMTARGVKNVLTNPRYAGIRMYLGERVGEAEWPAILDLEVHLRLVEALTDPARTKGTVKMGRTPTSLLTGLAACAVCKAKVRGSSVRGRLTYACRSSHAHIDRADVDTLALGAVINRLSSPAWVETLAPAGDDRLTKAKVLVEEKREALKVYARLLASGAMDEEQFTEASRVARDAMKEAEQTLSQAADGAALSGLDLGTDRVEKQLLALPLARQRGIVEQLLTVEILPQVKSRLAPLSSAERVIIS

SEQ ID NO: 2729 - protein, 440 aa, Artificial Sequence
  Description of Artificial Sequence: Synthetic polypeptide
MIYTRVSRDDTGEGQSNQRQERECRRLTDYKRLDVVAVEQDISVSAFSGKERPAWKRVLDMVRAGEVDYVIAYHMDRMTRSMTDLEELIVLCEEHGVGIATAVGEIDLTSDMGRMVARILAAVARAEVERKSARQKLANAQRAAEGKPHSGGQRPFGYARDHMTVVEDEAVLIKAGAERALAGEPLISISKDWGMTARGVKNVLTNPRYAGIRMYLGERVGEAEWPAILDLEVHLRLVEALTDPARTKGTVKMGRTPTSLLTGLAACSVCKGKVRGSSVRGRLTYACRSSHAHIDRADVDTLALGAVINRLSSPAWVETLAPAGDDRLAKAKLVAEEKREALKMYARLLASGAMDEEQFTEASRVARDAMKEAEQTLSQAADGAALSGLDLGTDRVEKQLLALPLARQRGIVEQLLTIEILPQVKSRLAPLSSAERVIIS

SEQ ID NO: 2730 - protein, 439 aa, Artificial Sequence
  Description of Artificial Sequence: Synthetic polypeptide
MQGNYKNKLTQQQRKNIVQMYNEGIPVFTLSKQFEVSRPTIYNVLEKAGNTTHKKIEFYIEKENKNKEEMEPKIEIIKTNFLGVTIDIENGSNNPQVLKALNSSFKLLDVVEFVKVTKFKLNLTMFDYFWQVVIGNTRVHLASRVLEWFGYEGEIKEQRKNFIRMLKRNNIDYQELTQKDKESSQYPTIQEELQLLPSNVTNSKFLLMEPDDIKMAIMQLKTKNGHTIRQYYIDLEKLLKLYTEYTLYFNHREATRKITDLEQTMRRLEESNQRQEKYMRSLGISLEEVKDQNEELLDDNKGLKKNVKGLRSEVKDVKRKLGIAVEDRAPLPANEDKQERFVLIKRNDDQHFQYYIIRAQNGYTTSRIKIQKVLFPHLEILLDFKANPNSKSLYNRIKEELKIKSVQFNGNNIDLEGSEVTEEELMEEMKVINDQKYNV

SEQ ID NO: 2731 - protein, 438 aa, Artificial Sequence
  Description of Artificial Sequence: Synthetic polypeptide
METKNVKHRLTLEEYTSVYDKYEQGMSVSKLSEKFKISRPTVYTILEKVRKDQKKNEFFIKNEEENKDNEIMTSNNTNFLGIVIDTENGSNNPKINKALNASFDLLDIMKFVEVTKFKLNTTMFDYFWQVVVGNRRVHLSPMVLTWFGYEGEIKEQKKAFIKMLQRNEIEYYQLTQKDQEIELYSTIKTEIAKMPSCDAVKSKFLIMAPNDIKMAIMQLKTKNGHTIRQYYIDIEELLKLYTEYTLYFNHRESQRKITNLEKMMTDMKLERQKDRELIQQQTQYMKSLGISLEEVKDQNEELLDETRGLKKQNKKIQHKLGIAVEDRAPQPEDESKRERFVLIKRNDPEYYLYYTIRAQEGYTTRKLKFEKANFPNLEVLLDFKCNPNSKTLYNRIKENLKVKNVTFKGNNIDLEGSEVDENKLVEEMKVINDSKRDI

SEQ ID NO: 2732 - protein, 438 aa, Artificial Sequence
  Description of Artificial Sequence: Synthetic polypeptide
MEPKQRLLPNQKLDIIKMYQNGYTVAQLTREFKVSRPTVYKILSQVNFEPKNENFFENVEQDKEMENTTFLGVTIDTEGGPRDFKVKKALKRSASLLDIIQFVEVTKFKLNMVMFDYFWQVMIGNRSSHITRPILEWFGYDGEYYTQRQNFTRMLKRNNISFNELISSDQEIKLYPTIQQELATYNEGAQACAKFLVMEPDDLKMAIMQLKTKNGDKIRQYYIDLEKLLKLYTEYTLYFNHREATRKITSLEKMMANMNLNLEEERKTREIERQKDRELIQQQTKYMRSLGISLEEVKDQNDELLDNNRGLKKEVKKVQHKLGIAVEDRAPQPEDESKRERFVLIKRNDPEYYPYYTIRAQEGYTTRKLKIENANFPNLEVLLDFKCNSKTLFNRIKENLKEKNVTFKGNNIDLEGSIIDEQELVEEMKVINDSKRDV

SEQ ID NO: 2733 - protein, 437 aa, Artificial Sequence
  Description of Artificial Sequence: Synthetic polypeptide
MELSNKFKLTPAQREDIVKKYTNGTSVLSISKEYNVSRQTVYTIIEKVKYPHKKNDFFINKLEDNKVYENMTSSTTNFLGITIDTENGSTNPKVRKALDTSFKLLDITQFIEVTKFKLNMVMFDYFWQVVVGQVTGVHLHSSILEWFGYEGLIKDQKKSFIKMLQRNTINYKQLTEKDEEIKLYPTIQEELQLIPTNVKHTKFIIMEPDDLKMAIMQLKTKNGHIIRQYYIDLEKLLKMYTEYTLYFNHRESQRKITNLEQMMADIKLERQKDREIMLRQEQYMRSLGISLEEVKDQNETLIDNNTTLKKEVKKVQHKLGIAVEDRAPLPADESKRERFVLIKRNDSDYYPYYTIRAQEGYTIRKLKTEKLHFPNLEVLLDFKCNPNSKSLYTRIKENLKSKGVTFKGNNIDLEDSEVDEEKLVEEMKATDSSKRDI

SEQ ID NO: 2734 - protein, 434 aa, Artificial Sequence
  Description of Artificial Sequence: Synthetic polypeptide
METKPRLTIEQRANVFKKYQDGCSVAEITREFKISRPTVYKILSKVNLTSKNEIFSEKEDGNKDMDSSTTFLGVNIDTINGPFDFKIKKALKRSLKLLDIMEFVEITKFKLNMVMFDYFWQVVVGNRSSPVGRPVLEWFGYEGEYFNQKKCFKKMLKNNAIQYRELTQGDKEIDEYPTIQQELQELNSGAQACSKFLIMEPDDLKMAIMQLKTKNGDTIRQYYIDLEKLLKLYVEYTLYFNHRESQRKITNLEEMMAKMDLDMKIREETRELEREKDRQYMRSLGISLEEVKDQNEELLDNNKGLKKNVKDIKRKLGIAVEDRAPLPVDEDKQERFVLLKRNDDQHYQYYTVRAQYGYTERKIKTNRLLFPQLEILLDFTAHPNSKSLYNRIKVELKTRNVQFNGNNIDLEGSEVTQEELIEEMKVINDQKYEI

SEQ ID NO: 2735 - protein, 434 aa, Artificial Sequence
  Description of Artificial Sequence: Synthetic polypeptide
MQGSYKNKLTLEQRNTIVQMFNDGVPVFTLSKQFEVSRPTVYNILEKAGNMNHKKIEFYIPKSNKNKEEMKPISEKIILSDTNTPFKTNFLGVTIDPENGSSNPKIRKALNASTQLLDIIEFVKVTKFKLNMTMFDYFWQVVVGNTRVHLVSRVLEWFGYEGEIKEQRKNFIRMLKRNGIEYHELTQKDKEIEMYPTIQEELQLLPKNVTNSKFLLMEPDDIKMAIMQLKTKNGHIIRQYYIDLEKLLKMYTEYTLYFNHREATRQITDLQQTMRELRESNQRQEQYMRSLGISLETVKDQNEELLGDNKEIKRKLGIAVKDRAPLPVNKDKQERFVLLKRNDDEYYPYYTIRAQEGYTERRIKTQKVLFPNLEILLDFKANPNSKTLYTRIKEKLKDSGVLFEGNNIEIEGSEVTEKELIDEMKVINDSKRNL

SEQ ID NO: 2736 - protein, 434 aa, Artificial Sequence
  Description of Artificial Sequence: Synthetic polypeptide
MNVAIYVRVSTLEQKEHGHSIEEQERKLKSFCEINDWNESDVFVDAGFSGAKRDRPELQRMMNDIKRFDLVLVYKLDRLTRNVRDLLDFLEIFEQNNVAFRSATEVYDTSTAMGRLFVTLVGAMAEWERETIRERVMMGKRAAIKQGMILTPPPFYYDRVDNTYIPNDYKKVVLWAYDEVLKGVSSKGIARKLNDSDIPPPNGKRWEDRTITRALRSPITRGHYTWGDVFIENSHEPIITEEMYQQIKERLEERINTKIVSHVSVFRGKFICPKCGGTLTMNTATKKRKKGYVTYKTYYCNTCKGKKESFGFAENEALRVFRDYLSKLDLGKYEVKTKQKDDVVTIDIDKIMEQRKRYHKLYAKGLMQEEELFELIKETDETIAEYEKQKELVPKKTLDIDKIKNSKMYCWNHGKYSRWMIKQISLRWPLSLST

SEQ ID NO: 2737 - protein, 431 aa, Artificial Sequence
  Description of Artificial Sequence: Synthetic polypeptide
MELSNKFKLTPAQREDIVKKYTNGTSVVSISKEYNVSRQTVYTIIEKVKYPHKKNDFFINKLEDNKVYENMTSSTTNFLGITIDTENGSTNPKVRKALDTSFKLLDITQFIEVTKFKLNMVMFDYFWQVVVGNQCLHVSTLILNWFGYEGDYRKQKESFIKILKRNTIEYRELTQKDKEIKMYPTIQEELQLLPHDAAKSRSKFLIMAPHDLKMAIMQLKTKNGHIIRQYYIDLEELLKVYTEYTLYFNHRESQRKITNLEQMMADIKLERQKDREIMLRQEQYMRSLGITLEEVKDQNEVLIDDNKEVKRKLGIAVEDRAPLPADESKRERFVLIKRNDPDYYPYYTIRAQEGYTIRKLKTEKLHFPNLEVLLDFKCNPNSKSLYTRIKENLKSKGVTFKGNNIDLEDSEVDEEKLVEEMKATDSSKRDI

SEQ ID NO: 2738 - protein, 430 aa, Artificial Sequence
  Description of Artificial Sequence: Synthetic polypeptide
MSGSHNIKLTFDQRQTIAKLHASGTTVVALSEQFGVSRPTVYKILEKMETKVEKEPYSIISTNLLGIIIDTKNGPTNPKINKALNASFKLLDITKFIEITEFKLNMVMFDYFWQIVVGQVTGLHVSTSILQWFGYQGEYKAQKDAFLRILKRNNISYQELTQKDKEIEMYPTIQEELQLIPSNVKHSKFLIMEPDDLKMAIMQLKTKNSNIIRQYYIDLEKLLKMYTEYTLYFNHYESNRKISTLEESMSQLNLTISKQEQIMIRQEQYMHSLGISLEEVKDQNDELLDKTTYLTKQNTGLQTEVKKVQYKLGIAVEDRAPLPLDEDKQERFVLIKRNNNEYYSYYTIRAQYKYTERRIKAQKVLFPNLEILLDFKANPNSKSLYTRIKDELKAKGVQFSGNNIDLEDSEVTEEKLMEEMKVINDQKYNV

SEQ ID NO: 2739 - protein, 430 aa, Artificial Sequence
  Description of Artificial Sequence: Synthetic polypeptide
MSGSHNIKLTFDQRQTIAKLHASGTTVVALSEQFGVSRPTVYKILEKMEKKVEKEPYSIISTNLLGIIIDTKNGPTHPKINKALNASFKLLDITKFIEITEFKLNMVMFDYFWQIVVGQVTGLHVSTSILQWFGYTGEYKAQKDAFLRILKRNNISYQELTQKDKKIEMYPTIQEELQLIPSNVKHSKFLIMEPDDLKMAIMQLKTKNGNTIRQYYIDLEKLLKMYTEYTLYFNYYESNRKISTLEESMSQLNLTISKQEQIMIRQEQYMHSLGISLEEVKDQNDELLDKTTYLTKQNTGLQTEVKKVQYKLGIAVEDRAPLPLDEDKQERFVLIKRNNNEYYPYYTIRAQYKYTERRIKTQKVLFPNLEVLLDFKANPNSKSLYTRIKDELKAKGVQFNGNNIDLEESEVTEKELMEEMKVINDQKYNV

SEQ ID NO: 2740 - protein, 430 aa, Artificial Sequence
  Description of Artificial Sequence: Synthetic polypeptide
MSTDQEEQLSSYENQVNYYREFISKHEDYELVDIYADEGISATNTKKRDAFNRLIQDCRAGKVDRILVKSISRFARNTLDCIKYVRELKELGVGVTFEKENIDSLDSKGEVLLTILSSLAQDESRSISENATWGIRKKFERGEVRVNTTKFMGYDKDENGRLIINPQQAETVKFIYEKFLEGYSPESIAKYLNDNEIPGWTGKANWYPSAIQKMLQNEKYKGDALLQKTFTVDFLTKKRVQNDGQVNQYYVENSHEAIIDEETWETVQLEMARRKTYRDEHQLKSYIMQSEDNPFTTKVFCGACGSAFGRKNWATSRGKRKVWQCNNRYRIKGVEGCYSSHLDEATLEQIFLKALELLSENIDLLDGKWEKILAENRLLDKHYSMALSDLLRQEQIDFNPSDMCRVLDHIRIGLDGEITVCLLEGTEVDL

SEQ ID NO: 2741 - protein, 430 aa, Artificial Sequence
  Description of Artificial Sequence: Synthetic polypeptide
MSTDQEEQLSSYENQVNYYREFISKHEDYELVDIYADEGISATNTKKRDAFNRLIQDCRAGKVDRILVKSISRFARNTLDCIKYVRELKELGVGVSFEKENIDSLDSKGEVLLTILSSLAQDESRSISENATWGIRKKFERGEVRVNTTKFMGYDKDDNGRLIINPQQAETVKFIYEKFLDGYSPESIAKYLNDNEIPGWTGKANWYPSAIQKMLQNEKYKGDALLQKTITVDFLTKKRVQNDGQVNQYYVENSHEAIIDKDTWELVQLELERRKAYREEHQLKSYIMQNDDNPFTTKVFCAECGSAFGRKNWATSRGKRKVWQCNNRYRVKGQIGCQNNHIDEETLEKAVVIAVELLSENVDLLHGKWNKILEENRPLEKHYCTKLAEMINKTSWEFDSYEMCQVLDSITISEDGQISVKFLEGTEVDL

SEQ ID NO: 2742 - protein, 430 aa, Artificial Sequence
  Description of Artificial Sequence: Synthetic polypeptide
MSTDQEEQLSSYENQVNYYREFISKHEDYELVDIYADEGISATNTKKRDAFNRLIQDCRAGKVDRILVKSISRFARNTLDCIKYVRELKELGVGVTFEKENIDSLDSKGEVLLTILSSLAQDESRSISENATWGIRKKFERGEVRVNTTKFMGYDKDENGRLIINPQQAETVKYIYEKFLEGYSPESIAKYLNDNEIPGWTGKANWYPSAIQKMLQNEKYKGDALLQKTFTVDFLTKKRIANDGQVNQYYVENSHEAIIDKDTWELVQLELARRKAYREEHQLKSYIMQNDDNPFTTKVFCKECGSAFGRKNWTTSRGKRKVWQCNNRYRVKGQIGCQNNHIDEETLEKAVVMAVELLSENVDLLHGKWNKILEENRPLEKHYSTKLAEVINKPSWEFDSYEMCQVLDSITISEDGQITVRFHEGTEVDL

SEQ ID NO: 2743 - protein, 430 aa, Artificial Sequence
  Description of Artificial Sequence: Synthetic polypeptide
MERHAMQLILEKAKKRELQMVLFKSIHRLARDLKDALEIKEILIANGIRLVTIEEGYDSHYEGKNDMKFEMFAMFASQYPKTLSVSISAALSAKVRRGEHTGGRLPFGYSDRDKKYVINEEEAEIVREIYDMYSKGIGYIGITKILNERGVPSKTGGKWQMSSVQRIIKNPIYKGDYILNQYTTVKISGRKKQIKNPEEKWTIFKNHHPAIVSEEQWELVNRPRSAKKRRPALWNEFRGIMFCAHCGSAMQVVYSAKKNKNGTKEEWRYLKCSRYKRYGRDECVRHAPIQYREFREFILDNLKEKEKQLETEFNLNEEISNADKKNKLQREIQRIEEKRKKLIDLYMEELIEKEEFLSRRNELEKIIKEKEVQFVSMEDKNEVKRTQDEFRKAFALLDESKNLYEEFKRIIDRIEIFENGDIKIVYRIEM

SEQ ID NO: 2744 - protein, 430 aa, Artificial Sequence
  Description of Artificial Sequence: Synthetic polypeptide
MSTDQEEQLSSYENQVNYYREYISKHEDYELVDIYADEGISATNTKKRDAFNRLIQDCRAGKVDRILVKSISRFARNTLDCIKYVRELKELGVGVTFEKENIDSLDSKGEVLLTILSSLAQDESRSISENATWGIRKKFERGEVRVNTTKFMGYDKDENGRLIINPQQAETVKFIYEKFLEGYSPESIAKYLNDNEIPGWTGKANWYPSAIQKMLQNEKYKGDALLQKTFTVDFLTKKRVQNDGQVNQYYVENSHEAIIDKDTWELVQLELARRKAYREEHQLKSYIMQNDDNPFTTKVFCKECGSAYGRKNWTTSRGKRKVWQCNNRYRVKGQSGCQNNHIDEETLEKAVVMAVELLSENVDLLHGKWNKILEENRPLEKHYSTKLADMINKPSWEFDSYEMCQTLDSITIVEDGQITVRFLEGTEVEL

SEQ ID NO: 2745 - protein, 430 aa, Artificial Sequence
  Description of Artificial Sequence: Synthetic polypeptide
MSTDQEEQLSSYENQVNYYREFISKHEDYELVDIYADEGISATNTKKRDAFNRLIQDCKAGKVDRILVKSISRFARNTLDCIKYVRELKELGVGVTFEKENIDSLDSKGEVLLTILSSLAQDESRSISENATWGIRKKFERGEVRVNTTKFMGYDKDENGRLIINPQQAETVKYIYEKFLEGYSPESIAKYLNDNEIPGWTGKANWYPSAIQKMLQNEKYKGDALLQKTFTVDFLTKKRIANDGQVNQYYVENSHEAIIDKDTWELVQLELARRKAYREEHQLKSYIMQNDDNPFTTKVFCKECGSAFGRKNWTTSRGKRKVWQCNNRYRVKGQIGCQNNHIDEETLERAVVMAVELLSENVDLLHGKWNKILEENRPLEKHYSTKLAEMINKPSWEFDSYEMCQVLDSITISEDGQISVKFLEGTEVDL

SEQ ID NO: 2746 - protein, 430 aa, Artificial Sequence
  Description of Artificial Sequence: Synthetic polypeptide
MSTDQEEQLSSYENQVNYYRDYISKHEDYELVDIYADEGISATNTKKRDAFNRLIQDCRAGKVDRILVKSISRFARNTLDCIKYVRELKELGVGVTFEKENIDSLDSKGEVLLTILSSLAQDESRSISENATWGIRKKFERGEVRVNTTKFMGYDKDENGRLIINPGQAETVKFIYEKFLEGYSPESIAKYLNDNEIPGWTGKANWYPSAIQKMLQNEKYKGDALLQKTFTVDFLTKKRVQNDGQVNQYYVENSHEAIIDKDTWELVQLELARRKDFREEHQLKAYIIQNDDNPFTTKVFCKACGSAFGRKNWTTSRGKRKVWQCNNRYRVKGQIGCQNNHIDEETLEKAVVMAVELLSENVDLLHGKWNKILEENRPLEKHYCTKLAEMINKPLWEFDSYEMCQVLDSITISEDGKISAKFLEGTEVDL

SEQ ID NO: 2747 - protein, 430 aa, Artificial Sequence
  Description of Artificial Sequence: Synthetic polypeptide
MSTDQEEQLSSYENQVNYYREFISKHEDYELVDIYADEGISATNTKKRDAFNRLIQDCKAGKVDRILVKSISRFARNTLDCIKYVRELKELGVGVTFEKENIDSLDSKGEVLLTILSSLAQDESRSISENATWGIRKKFERGEVRVNTTKFMGYDKDENGRLIINPQQAETVKYIYEKFLEGYSPESIAKYLNDNEIPGWTGKANWYPSAIQKMLQNEKYKGDALLQKTFTVDFLTKKRIANDGQVNQYYVENSHEAIIDKDTWELVQLELARRKAYREEHQLKSYIMQNDDNPFTTKVFCKECGSAFGRKNWTTSRGKRKVWQCNNRYRVKGQIGCQNNHIDEETLEKAVVMAVELLSENVDLLHGKWNKILEENRPLEKHYSTKLAEVINKPSWEFDSYEMCQVLDSITISEDGQISVKFLEGTEVDL

SEQ ID NO: 2748 - protein, 430 aa, Artificial Sequence
  Description of Artificial Sequence: Synthetic polypeptide
MSTDQEEQLSSYENQVNYYRDYISKHEDYELVDIYADEGISATNTKKRDAFNRLIQDCRAGKVDRILVKSISRFARNTLDCIKYVRELKELGVGVTFEKENIDSLDSKGEVLLTILSSLAQDESRSISENATWGIRKKFERGEVRVNTTKFMGYDKDENGRLIINPGQAETVKFIYEKFLEGYSPESIAKYLNDNEIPGWTGKANWYPSAIQKMLQNEKYKGDALLQKTFTVDFLTKKRVQNDGQVNQYYVENSHEAIIDKDTWELVQLELARRKDFREEHQLKAYIIQNDDNPFTTKVFCKACGSAFGRKNWTTSRGKRKVWQCNNRYRVKGQIGCQNNHIDEETLEKAVVMAVELLSENVDLLHGKWNKILEENRPLEKHYCTKLAEMINKPLWEFDSYEMCQVLDSITISEDGQISAKFLEGTEVDL

SEQ ID NO: 2749 - protein, 429 aa, Artificial Sequence
  Description of Artificial Sequence: Synthetic polypeptide
MIRPRLNKEQRNEVIEKYTQGIPIAHISRQFKVTRPTIYNVIESQGNTSHKKIDFYVDKLEKNKDMSTSEIKTNFLGVAIDTENGSNNPKIRKALDNSFKLLDIMEFVKITKFKLNMVMFDYFWQVVIGNHSTLIGSMVLEWFGYTGEYKKQRQNFKKMLSNNNICYDELTHKNIDHELYPIIQHELSGMSNCDIVKSKFLIMEPDDLKMAIMQLKTKNGHTIRQYYIDLEKLLKMYVEYTLYFNHRESQRKITNLEQMMGDMKLEREKDRQYMRSLGITLEEVRDQNDELLDNNRGLKKDVKEVKRKLGIAVKDRAPQPDDESKRERFVLIKRNDPEYYPYYTIRAQEGYTTRKLKFEKENFPNFEVLLDFKFNPNSKTLFNRIKENLRTKGVIFDRNNIDLEEAEIDEEKLIEEMKVINDQKLNIRI

SEQ ID NO: 2750 - protein, 429 aa, Artificial Sequence
  Description of Artificial Sequence: Synthetic polypeptide
MTLYPIHKLTLDERQNIIDLYNSGTTIAYLSRQFKVSRPTIYSIIQKRLNDQKEIDFYTAKIEENKDLNMENPTTNFLGITIDSENSSSNPKINKALNKSLSLLNIIQFIEVTKFKINSVMFDYFWQVVVGNHSVHLVTMIFDWFGYEGENKEQKRNFKKMLKNNNISYRELTHKDNEIELYPSIKKELSKMATCDIVKSKFLIMEPKDLKMAIMQLKTKNGHTIRQYYIDLEELLKLYTEYTLYFNHRESQRKITDLEKMMADMNLTMQRQEKYMQSMGIQLEDVKDQNEELLDKTRGLKKQNKQIQRKLGIAVEDRAPQPEDESKRERFILMKRNNDEYYPYYTIRAQDGYTTRKIKIQKNYFPDLEILLDFKCNPNSKTLYNRIKENLKTKGVEFTGNNIDLRESQVLEEELIKEMEVINDQRYNV

SEQ ID NO: 2751 - protein, 429 aa, Artificial Sequence
  Description of Artificial Sequence: Synthetic polypeptide
MSGSHNIKLTLDQRQTIAKLHASGTTVVALSEQFGVSRPTVYKILEKMETKVEKEPYSIISTNLLGIVIDTKNGPMNPKINKALNASFKLLDITKFIEITEFNLNMVMFDYFWQIVVGNTHVHLARRILEWFGYEGEYFEQKRLFQRMLKRNNISYQELTQKDKEIEMYPTIQEELQLIPSNVKNSKFLIMEPDDLKMAIMQLKTKNSNIIRQYYIDLEKLLKMYTEYTLYFNHYESNRKISTLEESMSQLNLTISKQEQIMIRQEQYMHSLGISLEEVKDQNDELLDKTTYLTKQNTGLQTQVKKVQYKLGIAVEDRAPLPLDEDKQERFVLIKRNNNEYYPYYTIRAQYKYTERRIKAQKILFPNLEILLDFKANPNSKSLYTRIKDELKAKGVQFSGNNIDLEDSEVTEEKLMEEMKVINDQKYNV

SEQ ID NO: 2752 - protein, 429 aa, Artificial Sequence
  Description of Artificial Sequence: Synthetic polypeptide
MEVGQVWVDNDLSATKKNVVRPDFEAMIASKPQAIVCWHTDRLIRVTRDLERVIDLGVNVHAVMAGHLDLSTPAGRAVARTVTAWATYEGEQKAERQKLANIQNARLGKPYTPGIRPFGYGEDHMTVVTAEADAIRDGAKMILDGWSLSAVARYWEELKLQSPRSTAAGGKGWSLRGVKKVLTSPRYVGRSSYLGEVVGDALWPPILDPDVYYGVVAILNNPDRFSGGPRTGRTPGTLLSGIGQCGYDDCKDTVGGRGYRGVLVYGCKDTHTRTPRSIADARASNATLARLMFPDFLPGLLASGQTESGESAASMHAEAQTLRERLDGLATAYAEGAINLSQMTAGSEALRKKLEVVESELVGSAGIPPFDPVAGVAGLISGWPDLPLPTRRAWVDFCCVVTLNPQRGRHLSNMTVDDHVTIEWRDVAE

SEQ ID NO: 2753 - protein, 429 aa, Artificial Sequence
  Description of Artificial Sequence: Synthetic polypeptide
MSGSHNIKLTLTQRQTIARLHSEGTTVVALAEQFGVSRPTIYKILGKMETKIEKEPYSIISTNLLGIVIDTKNGSNNPKINKALNASFKLLDIMEFVKITKFKLNMVMFDYFWQVVVGNTRSHLGSRVLEWLGYEGEDKVQKRKFIEMLKRNGISYQELTQKDKEIEMYPTIQEELQLLPSNIKNSKFLIMEPDDLKMAIMQLKTKNGDIIRQYYIDLEKLLKMYTEYTLFFNHYESERKISTLEESMSQLNLTISRQEHIMLQQTQYMRSLGISLEEVKDQNEVLIDQNDELLDNNRGLKKEVKKVQRKLGIAVEDRAPLPEDVDKQERFVLIKRNDDQHFQYYTIRAQCKYTERKIKAQKMLFPHSEVLLDFKANPNSKTLYDRIRDSLKAKNVVFKGNNIDIEDAEIDEQELIDEMKVINDQRYNI

SEQ ID NO: 2754 - protein, 429 aa, Artificial Sequence
  Description of Artificial Sequence: Synthetic polypeptide
MSTDQDEQLSSYENQVRYYQDYIRQNPLYELVDIYADEGISGTNTKKRTEFNRLIGDCRKGKVDRIIVKSISHFSRNTLDCLKYVRELKELGIGVTFEKENIDSLDAKGEVLLTILSSLAQDESRSISENATWGIRKKFERGEVRVNTTKFVGYDKGENGNLIINEEQAKIVRRIFRDFLQGETPESIARTLKEEGVPGWNGKVNWYPTTIQRMLQNEKYMGDALLQKTYTVDFLTKKRSENQGQVNQYYIEGNHEAIINKEEWELVQLEVDRRNQFRQDNHINFYIIQCEQNPFTCKVFCKECGGLFGRKNWTTSRGKRPVWQCNNRYKVKGVQGCTNRHIDEETLQQAFLRAIEILHENKGQLLGKWAIFDEEQKLEKYHAAQLKELLDSEQEAFDGRKMCQVLEKITLGEDGSITIKFLEGTEVNL

SEQ ID NO: 2755 - protein, 428 aa, Artificial Sequence
  Description of Artificial Sequence: Synthetic polypeptide
MSTDQDEQLSSYENQVNYYRDFISKHEDYELVDIYADEGISATNTKKRDAFNRLIQDCRDGKVDRILVKSISRFARNTLDCIKYVRELKDLGIGVTFEKENIDSLDSKGEVLLTILSSLAQDESRSISENATWGIRKRFERGEVRVNTTKFMGYDKDKDGNLIINREQAEVVRYIYERFLKGYTPESIARDLNDRDVPGWSGKANWYPSSILKMLQNEKYKGDALLQKTYTVDFLTKKRTENDGQVNQFYVANNHEGIIDHEMWETVQLEIARRKAFREEHGIPFYHLQNEDNPFMTKVFCAECGDAFGRKNWTTSRGKRKVWQCNNRYRVTGVMGCSNNHIDEEMLEKAFMEAVSILKDYKADVLDKLEKLSKGDNLLNKHYAKFMKQLLDLDHYDCTIMCQVLDNITISESGQITVTFLEGTEVDL

SEQ ID NO: 2756 - protein, 427 aa, Artificial Sequence
  Description of Artificial Sequence: Synthetic polypeptide
MIVAYRVDRLTRSIRHLQQLVHWAEDHKKLIVSATEAHFDTTSPFAAVVIALMGTVAQMELEAIKERNRSAAHFNIRAGKYRGSLPPWGYMPARVDGEWRLLVDPVQRERILEVYHRVVDNHEPLHQIAHDLNQRGLPSPKDYFAKLQGREPKGREWSATALKRSLISEAMLGYATLNGKTVRDDDGAPLVRAEPILTREQLESLRAELVKADRAKPAVSTPSLLLRVLFCAVCGEPAYKFTGGGRRNSRYRCRSWGWAQRCGNGTVAMAEWDAFCEEQVLDLLGDAERLEKVWVAGSDSAVELAEVNAELVDLTSLIGSPAYRVGSPQREALEARIAALAARQEELEGLEARPSGWEWRETGQRFADWWGQQDTSGKNTWLRSMNVRLTFDVRGGLTRTIDFGDLQEYEQHLRLGSVVEQLHAGMS

SEQ ID NO: 2757 - protein, 426 aa, Artificial Sequence
  Description of Artificial Sequence: Synthetic polypeptide
MLRPRLNKEQRNEVINLYTQGIPIAHISRQFKVTRPTIYNVIESQGNTSHKKIDFYFEKKGENKDMSELQKINFLGVDIDTENGSSNPKIRKALNASFNLLDITQFIEVTKFKLNTTMFDYFWQVVVGNTRVHLATRVLEWFGYEGELREQKRLFLRMLKRNNISYKELTQKDKEIELYPTIQEELQLIPSNITNSKFVIMEPRDLKMAIMQLKTKNGHIIRDYYIDLEELLKMYVEYTLYFNHREASRKITNLEQMMVDMKLERERDRQYMRSLGITLEEVRDQNDELLDNNRGLKKEVKKVQHKLGIAVEDRAPLLEDESKRERFVLIKRNDPEYYPYYTIRAQEGYTTRKLKFEKTNFPNLEVLLDFKCHPNSKTLFNRIKENLKTKNVVFKGNNIDLEEAKIDEQELVEEMKVINDQKLDIK

SEQ ID NO: 2758 - protein, 425 aa, Artificial Sequence
  Description of Artificial Sequence: Synthetic polypeptide
MAYRVDRLTRSIRHLQQLVHWAEDHKKLVVSATEAHFDTTTPFAAVVIALMGTVAQMELEAIKERNRSAAHFNIRAGKYRGSLPPWGYLPTRVDGEWRLVPDPVQRERILEVYHRVVDNHEPLHLVAHDLNRRGVLSPKDYFAKLQGREPQGREWSATALKRSLISEAMLGYATLNGKTVRDDDGAPLVRAEPILTREQLEALRAELVKTSRAKPAVATPSLLLRVLFCAVCGEPAYKFTGGGRKNARYRCRSWGWAQRCGNGTVAMAEWDAFCEEQVLDLLGDSERLEKVWVAGSDSAVELAEVNAELVDLTSLIGSPAYRVGSPQREALDARIAALAARQEELEGLEARPSGWEWRETGQRFGDWWREQDISGKNAWLRSMNVRLTFDVRGGLTRTIDFGDLQEYEQHLRLGSVVERLHAGMS

SEQ ID NO: 2759 - protein, 424 aa, Artificial Sequence
  Description of Artificial Sequence: Synthetic polypeptide
MKRVNKLNKQDKESIFDLYLKGYTITGLCKQFNVSRPTIYKVINVGKEEEQNDFCVDIKEESKGKIMTNTNFLGLTIDAENGPKDRRICKVLNQGFKLLDIMEFIKATKFDLNMIMFDYFWQVVVGNQWVHLHPLVLEWFGYEGEIKEQRKNFIKMLKRNNIPYQELTRTNKEIELYPTIKDELSLLPHDAARACIKFLIMCPKDLKMAIMQLKTKNGNAIREYYINLEELLKLYVEYTLYFNHRESQRKITDLEQMMADLKLSNKRQEQYMRSLGISLEEVKDQNDSLLGETKDLKKQNNTIQRKLGIAVEDRAPLPEDKKKRERFLLLKLNDPEYLPYYTIRAQYAYTLTKLKNYRTWYPNLEVLLDFKCNPNSKTLYVRIKESLKAKGVVFDGNNIDLKDAIEEEELLEEMKVINEQKYDV

SEQ ID NO: 2760 - protein, 421 aa, Artificial Sequence
  Description of Artificial Sequence: Synthetic polypeptide
MQQLIKDADTGLYDAVLVYKLDRLSRSQKDTLYLIEDVFQKNNIHFISLSENFDTSTAFGKAMIGILSVFAQLEREQIKERMSMGRVGRAKSGKIMEFNNPAFGYEVDGDNYKVDPLRAEIVKRIYKMYLSGTSINKIKETLNLEGHIGNKKNWSDTRIRYILSNPTYLGKIRYDGKTYDGKFSPIIDEETFNKTQNELKERQTATYKRFNMKLRPFQSKYMLSGLLRCGYCGATLFVNSYVYNGKRKLRYNCPSTYKSKQKTRTYKIMDPNCPFKLVYAKDLEPAVINEIKNLALNPQSIQKPVKKKPDIDVEAIQKELAKVRKQQQRLIDLYVISDDVNIDNISKKSADLKLQEETLKKQLAPLEEPNDDDKIVAFNEILAQIKDIDSLDYDKQKFIVKKLIKKIDVWNDNKIKIHWNI

SEQ ID NO: 2761 - protein, 419 aa, Artificial Sequence
  Description of Artificial Sequence: Synthetic polypeptide
MSSHKLTIEEHQTIIDLYNNGTTISYLSRQFKVSRPTIYTILNKVRNDHKEIDFYVDKLDENKDMDSNTNVTNFLGITIDNENGSNNRKINKALNSSFKLLDIIKFVEVTKFKINTLMFDYFWQVIVGNITYTPVSISVLEWFGYTGEYYKQRQNFKKMLKNNNIPYRELTQKDKEIELYPTIQEELQLIPTNVKHSKFLIMEPKDLKMAIMQLKTKNGHIIRKYYIDLEELLKAYTEYTLYFNHRESLRKITGLEQKMTEMTQYMRSLGISLEEVKDQNQELLGKTKGLKKQNKLIQRKLGIAVEDRAPQPEDESKRERFVLIKRNDPEYYPFYIIRAQEGYTKRKLKSEKNNFPNLEVLLDFKCSPNSKSLYTRIKENLKIKNVTFINNNIDLEDASMTEEELIEEMKVINESKREI

SEQ ID NO: 2762 - protein, 418 aa, Artificial Sequence
  Description of Artificial Sequence: Synthetic polypeptide
MNFKYYNEIIDKIVALKQQGIGSRQIAKQLNIGKSTVNQYYSAWIELEDSNKEIITDTEQEDKTFEDNLNVLCEHPDYSVSNLAKRLRHAHRANNQLRKIQREIADTDFNFKEMLVGIEKAVDKVQVSKYSPRVYPAVASKQNGAVEVLFSDWQIGKVAQHYNTEIGIRALEDYGQQVRTFILDKQRTKNVDKVVFASLGDIVEDHMKHGIQSAVACDTGLSEQISNAIVYIWEYVLEPILQLGVPVEFVGIAGNHGSSQHKGMDIYKAGLYSYDYAIYTALKQLAKVGKYDNITFNIPHGAFGHVEIYGNTVIYEHGYFNSATEKSMSDQMKKRGQQIKKHVEYFRIGDMHHVCSYDCHKMVLNGAFFGVDTAATEYSGVLGFSSIPAQVIMWHEPEDNIGKSSVKEFKTIQLAIVE

SEQ ID NO: 2763 - protein, 418 aa, Artificial Sequence
  Description of Artificial Sequence: Synthetic polypeptide
MNFKYYNEIIDKIVALKQQGIGSRQIAKQLNIGKSTVNQYYSAWIELEDSNKEIITDTEQEDKTFEDNLNVLCEHPDYSVSNLAKRLRHAHRANNQLRKIQREIADTDFNFKEMLVGIEKAVDKVQVSKYSPRVYPAVASKQNGIVEVLFSDWQIGKVAQHYNTEIGIRALKDYGQQVRTFILDKQRTKNVDKVVFASLGDIVEDHMKHGIQSAVACDTGLSEQISNAIVYIWEYVLEPILQLGVPVEFVGIAGNHGSSQHKGMDIYKAGLYSYDYAIYTALKQLAKVGKYDNITFNIPHGAFGHTEIYGNTVIYEHGYFNSATEKSMSDQMKKRGQQIKKHVEYFRIGDMHHICSYDCHKMILNGAFFGVDTAATEYSGVLGFSSVPSQVIMWHEPEDNIGKSSVKEFKTIQLAIVE

SEQ ID NO: 2764 - protein, 415 aa, Artificial Sequence
  Description of Artificial Sequence: Synthetic polypeptide
METKKKLTTQQRLDIIKFYQEGTTIIQLSSDFKVSRPTIYNILKKANLTSQNEIFYKNQNINKDMEDNTTFLGVSIDTINGPYDFKIKKALKCSASLLDITQFIQITKFKLNMTMFDYFWQVMVGNRSSLVGRPILEWFGYEGEYFNQKKCFKKMLKNNAIEFRELTQEDKEIDQYPAIQQELQELNQGARTCAKFLIMEPDDLKMAIMQLKTKKGDIIRQYYIDLEKLLKLYVEYTLYFNHRESQRKITDLEYKMDEMTKYMRSLGISLETVKDQNEELLDKNNELLDDNKEVKRKLGIAVKDRAPLPDDKKKQERFVLLKRNDEDYMPYYTIRAQDSYTTRRLRTQNELFPNLQILLDFKANPNSKSLYIRIKDKLKDLGVTFEGNNIDLNGVIEEEKLIEEMKVINDAKKNI

SEQ ID NO: 2765 - protein, 413 aa, Artificial Sequence
  Description of Artificial Sequence: Synthetic polypeptide
MSVKKIRVNKQKHKQRICAYIRVSTTNGSQLESLENQKHYFENLYSNRDDIDFVGVYHDRGISGSKDNRPNFQAMIENCRKGMIDIIHTKSIARFARNTVTVLEISRELKAIGVDIFFEEQNIHTLSSEGEVMLSVLASIAEDELRSMSGNQRWAFQKKFQRGELVINTKRFLGYDIDENGELIINPEEALIVRKIFALYLEGYGTHRIAKLLNEKGVATVTGAKWHDTTIRQMLSNEKYNGSVLLQKYFHDGVNGPKKLNQGELEQYLIEDNHEAIISMEDWQAVQVKLNSRRWQQGRNKTYKFTGLLKCQHCGSTLKRQVSYKKKIVWCCSKYIKEGKATCQGMRVPEVDISNWEITSPVTVIERDRNGEKYYSYTGQESADQCSSSGQEENQSSRILPSVHRPRRAAIKL

SEQ ID NO: 2766 - protein, 413 aa, Artificial Sequence
  Description of Artificial Sequence: Synthetic polypeptide
MSVKKIRVNKQKNKQRICAYIRVSTTNGSQLESLENQKQYFINLYSNRDDIDFVGVYHDRGISGSKDNRPNFQAMIENCRKGMIDVIHTKSIARFARNTVTVLEISRELKAIGVDIFFEEQNIHTLSSEGEVMLSVLASIAEDELRSMSGNQRWAFQKKFQRGELVINTKRFLGYDLDENGELIINPEEALIVRQIFALYLEGYGTHRIAKLLNEKGVATVTGAKWHDTTIRQMLSNEKYNGSVLLQKYFHDGVNGPKKLNQGELEQYFIEDNHEAIISMEDWQTVQAKLNRRRWQQGRNKTYKFTGLLKCQHCGSTLKRQVSYKKKIVWCCSKYIKEGKAACQGMRVPEVDISNWTVTSPVKVIERDRDGEKYYSYSSQESADQYSSSGQEENQSSRILSSVHRPRRTAIKL

SEQ ID NO: 2767 - protein, 413 aa, Artificial Sequence
  Description of Artificial Sequence: Synthetic polypeptide
MSVKKIRVNKQKHKQRICAYIRVSTTNGSQLESLENQKHYFENLYSNRDDIDFVGVYHDRGISGSKDNRPNFQAMIENCRKGMIDIIHTKSIARFARNTVTVLEISRELKAIGVDIFFEEQNIHTLSSEGEVMLSVLASIAEDELRSMSGNQRWAFQKKFQRGELVINTKRFLGYDIDENGELIINPEEALIVRKIFALYLEGYGTHRIAKLLNEKGVATVTGAKWHDTTIRQMLSNEKYNGSVLLQKYFHDGVNGPKKLNQGELEQYLIEDNHEAIISMEDWQAVQVKLNSRRWQQGRNKTYKFTGLLKCQHCGSTLKRQVSYKKKIVWCCSKYIKEGKAACQGMRVPEVDISNWEITSPITVLERDRNGEKYYSYSGQESADQRSSSGQEENQGSRILSSVHRPRRTAIKL

SEQ ID NO: 2768 - protein, 413 aa, Artificial Sequence
  Description of Artificial Sequence: Synthetic polypeptide
MSVKKIRVNNQKHKQRICAYIRVSTTNGSQLESLENQKQYFENLYSNRDDIDFVGVYHDKGISGSKDNRPNFQAMIENCRKGMIDVIHTKSIARFARNTVTVLEISRELKAIGVDIFFEEQNIHTLSSEGEVMLSVLASIAEDELRSMSSNQRWAFQKKFQRGELVINTKRFLGYDVDENGELIINPEEALIVRQIFALYLEGYGTHRIAKLLNEKGVGTVTGAKWHDTTIRQMLSNEKYNGSVLLQKYFHDGVNGPKKLNQGELEQYFIEDNHEPIISMEDWQTVQEKLNSRRWQQGKNKTYKFTGLLKCQHCGSTLKRQVSYKKKIVWCCSKYIKEGKAACQGMRVPEVDISNWTVTSPVKVIERDRDGEKYYSYSGQESAEHRSTSGQKENQCSRILPSVHRSRRTAIKL

SEQ ID NO: 2769 - protein, 413 aa, Artificial Sequence
  Description of Artificial Sequence: Synthetic polypeptide
MSVKKIRVNRQKHRKRVCAYIRVSTTNGSQLDSLENQKQYFEKLYSNRDDIDFIGVYHDRGISGSKDNRPNFQAMIEDCCRGKIDVIHTKSIARFARNTVTVLEISRELKAIGVDIFFEEQNIHTLSSEGEVMLSVLASIAEDELRSMSGNQRWAFQKKFQRGELVINTKRFLGYDVDENGELIINPEEALIVREIFALYLAGNGTHRIAKQLNEKGVATVTGAKWHDTTIRQMLSNEKYKGSVLLQKYFHDGVNGPKKLNQGELEQYLIEDNHEAIISKEDWQVVQDKLNSRGWQQGRNKTYKFTGLLKCQYCGSTLKRQVSYKKKIVWCCSKYIKEGKVACQGMRVPEVDISNWEINSPVTVIERDRNGEKYYSYSGQESADQRFSSGQEENQGSRILSSVHRPRRTAIKL

SEQ ID NO: 2770 - protein, 413 aa, Artificial Sequence
  Description of Artificial Sequence: Synthetic polypeptide
MSVKKIRVNRQKHRKRVCAYIRVSTTNGSQLESLENQKQYFENLYSNRDDIDFVGVYHDRGISGSKDNRPNFQAMIEDCRKGMIDIIHTKSIARFARNTVTVLEISRELKAIGVDIFFEEQNIHTLSSEGEVMLSVLASIAEDELRSMSGNQRWAFQKKFQRGELVINTKRFLGYDVDENGELIINPEEALIVREIFALYLAGNGTHRIAKQLNEKGVATVTGAKWHDTTIRQMLSNEKYKGSVLLQKYFHDGVNGPKKLNQGELEQYLIEDNHEAIISKEDWQAVQDKLNSRRWQQGRNKTYKFTGLLKCQHCGSTLKRQVSYKKKIVWCCSKYIKEGKAACKGMRVPEVDISNWTVTSPVTVIERDRDGEKYYSYSSQESADQYSSSGQEENQGSRILSSVHRPRRTAIKL

SEQ ID NO: 2771 - protein, 413 aa, Artificial Sequence
  Description of Artificial Sequence: Synthetic polypeptide
MSVKKIRVNRQKHRKRVCAYIRVSTTNGSQLDSLENQKQYFENLYSNRDDIDFMGVYQDRGISGSKDKRPDFQAMIEECRKGKIDVIHTKSIARFARNTVTVLEISRELKAIGVDIFFEEQNIHTLSSEGEVMLSVLASIAEDELRSMSGNQRWAFQKKFQRGELVINTKRFLGYDIDENGELIINPEEAFIVRQIFALYLEGYGTHRIAKLLNEKGVATVTGAKWHDTTIRQMLSNEKYNGSVLLQKYFHDGVNGPKKLNQGELEQYLIEDNHEAIISKEDWQTVQDKLNSRRWQQGRNKTYKFTGLLKCQHCGSTLKRQVSYKKKIIWCCSKYIKEGKVACQGMRVPEVDISNWVITSPVTVIERDGNEEKYYSYSGQESEDQRSSSGQEENQGSRILSSVHRPRRTAIKL

SEQ ID NO: 2772 - protein, 413 aa, Artificial Sequence
  Description of Artificial Sequence: Synthetic polypeptide
MSVKKIRVNKQKHKQRICAYIRVSTTNGSQLESLENQKQYFENLYSNRDDIDFVGVYHDRGISGSKDNRPNFQAMIEDCRKGMIDIIHTKSIARFARNTVTVLEISRELKAIGVDIFFEEQNIHTLSSEGEVMLSVLASIAEDELRSMSGNQRWAFQKKFQRGELVINTKRFLGYDLDENGELIINPEEALIVRQIFALYLEGHGTHRIAKLLNEKGVATVTGAKWHDSTIRQMLSNEKYNGSVLLQKYFHDGVNGPKKLNQGELEKYFIEDNHEAIISMEDWQTVQDKLSSRRWQKGRNKTYKFTGLLKCQHCGSTLKRQVSYKKKIVWCCSKYIKEGKVTCQGMRVPEVDISNWEITSPVTVIERDRNGEKYYSYTGQESADQCSSSGQEENQSSRILPSVHRPRRAAIKL

SEQ ID NO: 2773 - protein, 413 aa, Artificial Sequence
  Description of Artificial Sequence: Synthetic polypeptide
MAVRLIKAKQDHKKQRICAYVRVSTTNSSQLDSLENQKTYFETLYANREDVDFLGVYYDKGISGAKEKRPNFQAMLEVCRQGQIDLIHTKSISRFARNTMTVLEVSRELKVLGVGIYFEEQNINTLSNEGEVMLSVLASLAEEELESMSTNQRWAFQKKFQRGEVVINTKRFMGYDVDVDGELVINEAEAQIVRRIFHLYLDGMGLHRIAKLLNEEGVTTVSNAKWHDTTVGHMLRNEKYKGAALLQKTYLDGVNGKRRLNQGEVAQYLIEDNHEPIVSKEVWQAVQHKLDSNTWKQGPNKHYLFTSMLRCQYCGSTLKRQVSYKKQIVWCCSKYIKEGKASCQGMRVPEKAIEEWKLKTPVTVIERTEYGQKHYSYSSQENAADGHPSASHQNQSGRLLSGVHRPRRTAIKL

SEQ ID NO: 2774 - protein, 413 aa, Artificial Sequence
  Description of Artificial Sequence: Synthetic polypeptide
MSVKKIRVNRQKHRKKVCAYIRVSTTNGSQLESLENQKQYFENLYSNRDDIDFVGVYHDRGISGSKDNRPNFQAMIENCRKGMIDIIHTKSIARFARNTVTVLEISRELKAIGVDIFFEEQNIHTLSSEGEVMLSVLASIAEDELRSMSGNQRWAFQKKFQRGELVINTKRFLGYDIDENGELIINPEEAFIVRQIFALYLEGYGTHRIAKLLNEKGVATVTGAKWHDTTIRQMLSNEKYNGSVLLQKYFHDGVNGPKKLNQGELEQYLIEDNHEAIISKEDWQTVQDKLNSRRWQQGRNKTYKFTGLLKCQHCGSTLKRQVSYKKKIIWCCSKYIKEGKVACQGMRVPEVDISNWVITSPVTVIERDGNEEKYYSYSGQESEDQRSSSGQEENQGSRILSSVHRPRRTAIKL

SEQ ID NO: 2775 - protein, 413 aa, Artificial Sequence
  Description of Artificial Sequence: Synthetic polypeptide
MAVRLIKAKSEQKKQRVCAYVRVSTTNSSQLDSLENQKTYFETLYANSEDVDFLGVYYDKGISGAKEKRPSFQAMLEACRQGQIDLIHTKSISRFSRNTMTVLEVSRELKVLGVGIYFEEQNINTLSNEGEVMLSVLASLSEEELESMSTNQRWAFQKKFQRGEMVSNTKRFMGYDVDDDGELVINEAEAQIVRRIFHLYLDGMGMHRIAKLLNEEGVPTVSNAKWHNTTVGHMLRNEKYKGAALLQKTYLHGVNGKRRLNQGKVAQYLIEDNHEPIVSKEVWQAVQDKLDSNTWKQGPNKHYRFTSMLRCQYCGSTLKRQVSYKKQIVWSCSKYIKEGKASCQGMRVPEKAIEDWRLKTPVTVIERNEYGQKHYSYSSQENAVDSHPSASHQNQSGRLLSSVHRPRRTAIKL

SEQ ID NO: 2776 - protein, 413 aa, Artificial Sequence
  Description of Artificial Sequence: Synthetic polypeptide
MSVKKIRVNKQKHKQRICAYIRVSTTNGSQLESLENQKHYFENLYSNRDDIDFVGVYHDRGISGSKDNRPNFQAMIENCRKGMIDIIHTKSIARFARNTVTVLEISRELKAIGVDIFFEEQNIHTLSSEGEVMLSVLASIAEDELRSMSGNQRWAFQKKFQRGELVINTKRFLGYDIDENGELIINPEEALIVRKIFALYLEGYGTHRIAKLLNEKGVATVTGAKWHDTTIRQMLSNEKYNGSVLLQKYFHDGVNGPKKLNQGELEQYLIEDNHEAIISMEDWQAVQVKLNSRRWQQGRNKTYKFTGLLKCQHCGSTLKRQVSYKKKIVWCCSKYIKEGKAACQGMRVPEVDISNWTVTSPVKVIERDRDGEKYYSYSGQESADQRSTSGQKESQCSRILPSVHRPRRTAIKL

SEQ ID NO: 2777 - protein, 412 aa, Artificial Sequence
  Description of Artificial Sequence: Synthetic polypeptide
MRIVRRIQPMMTPQKPKLRVAAYARVSDSRLHHSLSTQVSYYSRLIQSHPDWELVGVYYDEGISGKEQSNRQGLQDLLKACDDGKIDRILTKSIARFGRNTVDLLSTVRVLRQKNIGITFEKEGIDSLSSEGELMLTLLASVAQEESHNISENLRWQIKKKFEQGQPHTPQDIYGYRWNGENYVIEPDEAKVVRQVFQWFLDGDNAPMITKKLNEQGVLTRLGNPFTVSSVREFFKQEAYFGRLVLQKTYREPFSRNPKRNNGQKNKYIVEDAHEAIVSKSYFDVVLQEKERRYKVMYQESHMHKGTFRELIECSHCGKIMITRVDSKKVHRTIRYCCRTRDRFGTSSCPSKTLSEKRILATFEDKIGFKPDKNWVTENIKKVIYDSSVGLITVFPIKGRKYELKVRKEHFL

SEQ ID NO: 2778 - protein, 412 aa, Artificial Sequence
  Description of Artificial Sequence: Synthetic polypeptide
MRTVRLIQPRMTPQKPKLRVAAYARVSDSRLHHSLSTQVSYYSRLIQSHPDWELVGVYYDEGISGKEQSNRQGLQDLLKACDDGKIDRILTKSIARFGRNTVDLLSTVRVLRQKNIGITFEKEGIDSLSSEGELMLTLLASVAQEESHNISENLRWQIKKKFEQGQPHTPQDIYGYRWNGENYVIEPDEAKVVRQVFQWFLDGDNVPMITKKLNEQGVLTRLGNPFTVSSVREFFKQEAYFGRLVLQKTYREPFSRNPKRNNGQKNKYIVEDAHEAIVSKSYFDVVLQEKERRYKVMHQESHMHKGTFRELIECSHCGKIMITRVDSKKVHRTIRYCCRTRDRFGTSSCPSKTLSEKRILATFEDKIGFKPDKNWVTENIKKVIYDSSVGLITVFPIKGRKYELKVRKEHFL

SEQ ID NO: 2779 - protein, 412 aa, Artificial Sequence
  Description of Artificial Sequence: Synthetic polypeptide
MRIVRRIQPMMTPQKPKLRVAAYARVSDSRLHHSLSTQVSYYSRLIQSHPDWELVGVYYDEGFSGKEQSNRQGLQDLLKACDDGKIDRILTKSIARFGRNTVDLLSTVRVLRQKNIGITFEKEGIDSLSSEGELMLTLLASVAQEESHNISENLRWQIKKKFEQGQPHTPQDIYGYRWNGENYVIEPDEAKVVRQVFQWFLDGDNAPMITKKLNEQGVLTRLGNPFTVSSVREFFKQEAYFGRLVLQKTYREPFSRNPKRNNGQKNKYIVEDAHEAIVSKSYFDVVLQEKERRYKVMYQESHMHKGTFRELIECSHCGKIMITRVDSKKVHRTIRYCCRTRDRFGTSSCPSKTLSEKRILATFEDKIGFKPDKNWVTENIKKVIYDSSVGLITVFPIKGRKYELKVRKEHFL

SEQ ID NO: 2780 - protein, 411 aa, Artificial Sequence
  Description of Artificial Sequence: Synthetic polypeptide
MRTVRRIQPIKSPCKPRFKVAAYARVSDSRLHHSLSTQISYYNRLIQAHPDWELVGIYYDEGISGKEQSNRQGFLNLIKDCEDGKIDRIITKSIARFGRNTVELLTTVRQLRLKNIGVTFEKENIDSLSSEGELMLTLLASVAQEESQNLSENIRWRIQKKFEKGIPHTPQDMYGYRWDGEQYQIEPNEAKVIRKVFKWYLDGDSVQQIVDKLNQEQVLTRLGNPFTVASIREFFKQEAYFGRLVLQKTYREAFSRNPKRNKGQRNKYIIENAHEPIVTKEYFDLVLHEKERRNQLMHQESHLNKGIFRDKISCSECGCLMIVKVDSKQVNKTVRYYCRTRNRFGASSCSCRTLGEKRLLASFKSKLGIVPDKEWVENNIKHIEYDFGYRILRVTPVKGRKYLIEIREGRY

SEQ ID NO: 2781 - protein, 411 aa, Artificial Sequence
  Description of Artificial Sequence: Synthetic polypeptide
MRTVRRIQPIKSPCKPRFKVAAYARVSDSRLHHSLSTQISYYNRLIQAHPDWELVGIYYDEGISGKEQCNRQGFQNLIKDCDDGKIDRIITKSIARFGRNTVELLTTVRQLRLKNIGVTFEKENIDSLSSEGELMLTLLASVAQEESQNMSENIKWRVQKKFEKGIPHTPQDMYGYRWDGEQYQIEPNEAKVIRKVFKWYLEGDSVQQIVDKLNQEQVLTRLGNPFTVASIREFFKQEAYFGRLVLQKTYRESFSRNPKRNKGQRNKYIIENAHEPIVTKEYFDLVLHEKERRYQLMSQESHLNKGIFRDKISCSECGCLMIVKVDSKQVNKTIRYYCRTRNRFGASSCSCRTLGEKRLLASFKSKLGIVPDKEWVENNIKHIDYDFGQRIIWVIPVKGRKYPIEIREGRY

SEQ ID NO: 2782 - protein, 411 aa, Artificial Sequence
  Description of Artificial Sequence: Synthetic polypeptide
MRTVRRIQPIKSPCKPRFKVAAYARVSDSRLHHSLSTQISYYNRLIQAHPDWELVGIYYDEGISGKEQSNRQGFQNLIKDCDDGKIDRIITKSIARFGRNTVELLTTVRQLRLKNIGVTFEKENIDSLSSEGELMLTLLASVAQEESQNMSENIKWRVQKKFEKGIPHTPQDMYGYRWDGEQYQIEPNEAKVIRKVFKWYLEGDSVQQIVDKLNQEQVLTRLGNPFTVASIREFFKQEAYFGRLVLQKTYRESFSRNPKRNKGQRNKYIIENAHEPIVTKEYFDLVLHEKERRYQLMSQESHLNKGIFRDKISCSECGCLMIVKVDSKQVNKTIRYYCRTRNRFGASSCSCRTLGEKRLLASFKSKLGIVPDKEWVENNIKHIDYDFGQRIIWVIPVKGRKYPIEIREGRY

SEQ ID NO: 2783 - protein, 407 aa, Artificial Sequence
  Description of Artificial Sequence: Synthetic polypeptide
MKPGKIRVCAYARVSTMTEKQQESLTNQQAYYNHFYHNKKDVDFIGVYYDQGISGKLAKRPGFQQMLEDCRAGKIDVIHTKSISRFARNTELLLAVSRELKTIQVDIFFEEQNLHTLSNEGEVMLTVLASYAEEELRNMSENQRWAFQKKFQRGELVINTKRFLGYDKDENGELIINPEEAKIVKRIYNLYLSGMGVHVIAKLFNEEKLSTVDGGKWYSSTITNILKNEKYKGDAILQKYYFAEIKAKQRLNQGQVQQYLLTDNHEAIVSREDWEAVQKRLKQKRKAKLSIDYNRRYPLSGLLKCEHCGSTLKRQKYYKGKVVWVCSKYIREGKASCIGMRVPDSAVQDWSIDEPTVVKEENISGKKHYSYSCQENYTSRAESTHSENPDGGLLPSVHRPRRTAIKL

SEQ ID NO: 2784 - protein, 405 aa, Artificial Sequence
  Description of Artificial Sequence: Synthetic polypeptide
MAVEQDISVSAFSGKERPAWKRVLDMVRAGEVDYVIAYHMDRMTRSMTDLEELIVLCEEHGVGIATAVGEIDLTSDMGRMVARILAAVARAEVERKSARQKLANAQRAAEGKPHSGGQRPFGYARDHMTVVEDEAVLIKTGAERALAGEPLISISKDWGMTARGVKNVLTNPRYAGIRMYLGERVGEAEWPAILDLEVHLRLVEALTDPARTKGTVKMGRTPTSLLTGLAACSVCKGKVRGSSVRGRLTYACRSSHAHIDRADVDTLALGAVINRLSSPAWVETLAPAGDDRLAKAKLVAEEKREALKMYARLLASGAMDEEQFTEASRVARDAMKEAEQTLSQAADGAALSGLDLGTDRVEKQLLALPLARQRGIVEQLLTIEILPQVKSRLAPLSSAERVIIS

SEQ ID NO: 2785 - protein, 403 aa, Artificial Sequence
  Description of Artificial Sequence: Synthetic polypeptide
MPRPSIQNVLDLRRDEVLELLGRGIPAEDVAKKFGVSRRTLYRWLERQGLTVQKIREEYQKLKEERERRKRERLAAIGEIPEDFEKFVEIEEVRKFLDWLKARRVTTAVDIVRTLHRVCLDLGIHPMLLLEDEGKEKLTSLLAKYNEMYKKWTVESIKANLRLWYKFNEKMPPAILSLEAYKSNMAHLAWFNVSDRAVILETAFRLLDKEQFDKVRAALLFLFYTGSRAEALTNVRFEAREVQVDGKRITAIIAITREKGRHGKKQWEKPLHPVIYEKYIKGRLPFSQAELKWLRRVLKAIYREALKGQESSVKYEYAMKHVIHIWRHTAAMSMLHATDWNVGLVAEILGWESPDILLKIYGRMPPEWKIAQALGVTVERPPFRFVYGNEEERLKELRILELP

SEQ ID NO: 2786 - protein, 403 aa, Artificial Sequence
  Description of Artificial Sequence: Synthetic polypeptide
MKTVTKIQQRVSPFQSKKKVAAYIRVSHSNLEHSFSNQVSYYNDFIQNKREWEFVGVYADFAISGKSQKERPEFRRLISDCRNGKINCILTKSISRFGRNTLELLETVRELRRLEIEVVFEKENIRTLSVDGELLLTLLASFAQEESTSLSQNIKWRVKERFKQGLPYIPQAIYGYRWNGEKYIIKPHEAEIVRKVFTWYLDGLGVPSIAKKLNDMGETTRLGNIFTKSILYEFFKQEAYFGRLVLQKTYRNDFNRSPKRNTGQRTKYIVDNAHEAIISKELFDKAQAEKKIRSKGRCYRKCYDDAFFKDKVFCQQCGRDMLITKEKKFGYRYNCRTRQQYGISTCPSKTLSERRLVRTVKEQLGDYLGSIQKVMFDSSSNQVTLYFDDDNIQILTLKRGQLK

SEQ ID NO: 2787 - protein, 402 aa, Artificial Sequence
  Description of Artificial Sequence: Synthetic polypeptide
MRMSRGELIGFNGCLGYDYHAEDKSLSVNEEEAETVRYIFNRYIEGAGCFVIARELENLGYKTAGGKTKWFDSSVRGIIKNEKYVGDIRAGKTFTVDPISKRRLKNLGEEDQFYIRDHHEPIISREVFDKAHEILNIRAESYKRYERGKSSRNKFTRQYAFSCIMECGYCGARLTRRHWMGKNGYSKIIWQCVTYARKGHKNCPYCKGVAESLIEEAFVKSYQYLFETNRYLIDDFMLKLEQNLSRKNYEKERDELSRKLSDLSKKRNALIDMKLDSVIDDQAYESKYYDLTDKINLAITKLESIEKSIVDDLDEKERLQEIRKVLSNNQTIETFDRKVFESIVSKVIVGGFDAEGNACPYNVTFILKSGLSDYPYTIGMKPEPNEVIPSNNHSPHKENPTC

SEQ ID NO: 2788 - protein, 402 aa, Artificial Sequence
  Description of Artificial Sequence: Synthetic polypeptide
MKQIKTIQAQKVTTIKRLKVAAYTRVSHTSLLQSLSNQISHYSQMIQANPEWDYVGVYSDSAISGRSQAHRRDFQQLLEDCHKGKIDLILTKSISRFGRNTVELLETVRELKRLGISVRFEKEKIDTLTAEGELLLTLLASMAQEESQSISQNIRWRVKKRFEEGKPYIPQDIFGYRWNGEEYMIEPHEASIVRQVFEWYMEGLSAPKIAKRLDDRGERTRLGNRFTQRVIYNMFDQEAYCGRLILQKTFRDHFSSRSIPNDGQMAKYIVENAHEAIVTPEYFQLVNQEKKRRARRRVSKHDALARLQGKVYCEHCGLDMILTLETKSNQEKRVRYYCRTRDGKGVEACLGRTVTEEQLFQAFGESINIEDIHHISFNSVTNEAKVTYRNGKEKHVIIQKGR

SEQ ID NO: 2789 - protein, 402 aa, Artificial Sequence
  Description of Artificial Sequence: Synthetic polypeptide
MKRIKTIQAQKLTAIKKLKVAAYTRVSHTSLLQSLSNQVSHYSQLIQSNPEWSYVGVYSDSAISGRCQAHRRDFQNLLEDSRKGKIDLILTKSISRFGRNTVELLETVRELKRLGISVRFEKENIDTLTAEGELLLTLLASMAQEESQSISQNIRWRVKKCFEEGKPYIPQDIFGYRWSGEEYVIEPHEASIVRQVFEWYMEGLSAPKIAKRLDARGERTRLGNRFTKRVIYNMFDQEAYYGRLILQKTFRDNFGSRSIPNDGQMAKYIVENAHEAIVTPEFFQQVNQEKKRRAKRRPSKHDALAKLQGKVYCEHCGLDMLLSVETKSNQEKRVRYYCRTRDAKGVEACLGRTITEEQLFQAFGETLKAEDIHHISFNSVTNEAKATYRNGEEKHIIIQKGR

SEQ ID NO: 2790 - protein, 402 aa, Artificial Sequence
  Description of Artificial Sequence: Synthetic polypeptide
MKQIKTIQAQKVTTIKRLKVAAYTRVSHTSLLQSLSNQVSYYSQMIQANPEWDYVGVYSDSAISGRSQAHRRDFQQLLEDCRKGKVDLILTKSISRFGRNTVELLETVRELKRLGISVRFEKEKIDTLTAEGELLLTLLASMAQEESQSISQNIRWRVKKRFEDGKPYIPQDIFGYRWNGEEYVIEPHEASIVRQVFEWYMEGLSAPKIAKRLDDRGERTRLGNRFTKRIIYNMFDQEAYCGRLILQKTFRDHFGSRSIPNDGQMAKYIVENAHEAIVTPEYFQQVNQEKKRRARRRVSKHDALAKLQGKVYCEHCGLDMILTLETKSNQEKRVRYYCRTRDAKGVEACLGRTVTEEQLFQAFGESINTEDIHHISFNSVTNEAKATYRNGEEKHVIIQKGR

SEQ ID NO: 2791 - protein, 399 aa, Artificial Sequence
  Description of Artificial Sequence: Synthetic polypeptide
MSKFHSIFDLNTVWILDYENFLKLGMIYIHAFGVVIGFLIGFSKLYSSDGFSKSYGSVLQSAAFFLILNNGILIDQGALRNENKILNGSYYGLVLYSSLAVLVCFNYVLDSLDNPWIHCKRILGIIPVTILLSYFIPELYFISFIDILGFAISIFTFIWSLKSVLKTNKSILFFNLPFLSFLISICFVLDLLGTIFNKKDFFLLAEIIPGSVICYTILLERFFPSLFGKVTFTIQDVSLVKDYKFETIPIIETKEQKKYKYPPRDLLEGIDLTIIQNKMNHFLDIKGFKDEEIRLPDFATDLGLTTHQASNYLNKFIKMSFTDFLNYHRIVEVITFMEKKTDFNLLNIALECGFNSASSFHRSCVKFTGKSPRDLKNYIQSNKGSSFTILQKPKVQSYS

SEQ ID NO: 2792 - protein, 392 aa, Artificial Sequence
  Description of Artificial Sequence: Synthetic polypeptide
MSIDTLGIDDEIVLTTIANINAHYKEKRKFVDIAKMQDIAPDILTVRFLNQGLETPTHYLKELRKDLAKRLVFEGELSLEEIAKTLSYDKTSNFYVWYLSVFGERPTKVRARMGLKSKRPSLGLVNAVISSIVENIDLNPHLYKDVNVLINDSIYTTTYIRQKFIELHGVTPRAYLLNKQLEYVAEQIKNHGYKETRLLEMTIYNAPTGLNKAFKAKYGMTTSEFGESKSIGMWAKVHGENVWILPSLMEEIIDNVTENLLENRPHLTELRELYGVNTSSWERMFTLYTGMLPSKARLFIRLEIVVYFLQNTRWKFSKILRKVGSDYEYDIRRYLMANYGLTPAEIRKHKGPLTRRNKTKQFVRFVKTNADLCIREDDIRLGKIKETELCTL

SEQ ID NO: 2793 - protein, 392 aa, Artificial Sequence
  Description of Artificial Sequence: Synthetic polypeptide
MSIDTLGIDDEIVLTTIANINAHYKEKRKFVDIAKMQNIAPDVLTVRFLNQGLETPTHHLKELRKDLAKRLVSDGELSLEEIAKTLGYDKTSNFYVWYLSVFGERPTKVRARMGLKSKRPSLGVVDAVISSIVEKIDLNPYLYKDVNVLINDSVYTTTYIRQKFIELHGVTPRAYLLNKQLEYVAEQIKTHGYKETRLLEMTIYNAPTGLNKAFKAKYGMTTSEFGESKSIGMWAKVHGENVWILPSLMEEIVDNVTENLLENRPHLTELREFYGVNTSSWERMFTLYTGMLPSKARLFIRLEIVVYFLQNTRWKFSKILRKVGSDYEYDIRRHLMANYGLTPAEIRKHKGPLTRRNKTKQFVRFVKTNADLCIREDDIRLGKIKETELCTL

SEQ ID NO: 2794 - protein, 392 aa, Artificial Sequence
  Description of Artificial Sequence: Synthetic polypeptide
MSIELPIAEDPITALTFKNIEKYYKEKRKFTDIAKLQKTCPNAITKRFENQGFETPTHYLKELRKELAKTLVTEGKLSLSEIAETLGYDKTMNFYVWYQSVFGERPTKVRARMGLKSKTPSSGVIDAIAKSIATKIDLNPNFYKDVTELMEEHGYSNVYIKRKFIEMYGKTPRAHLLDRQLEYVADQIKTHGYKEARLMGMTMHNAPTGLNKAFKAKYGMTTSDYGESLSIGTWAKVHGENVWVMPSLMDEILDNVTENLLDDRLNLYQLREFYGLNSHSWERMFTLYTGMLPSKVRQCIRLELIVYFLQNTRWKFTKILRKVGSDYEYDVRRQLTENYGLTPVEIRKLKGPLTRRYNTEQFIRFVKTNADLCIREDDIRLGKIEVTEPCTL

SEQ ID NO: 2795 - protein, 370 aa, Artificial Sequence
  Description of Artificial Sequence: Synthetic polypeptide
MVRRNSKITRQQKKIRDAFVSERTVEIIPAKREFTDVKTKKLRVAAYCRVSTFDESQSGSFELQKQTYTERINSNPDWIMAGIYADQGASGTSIKRREQFQQMLHDCRCGKIDLIIVKSVSRFARNQLDFISIYRELKALSPPVGIYIEDINLNTLDTNSEFILGIMAIVAQGESEQKSASITWSVIERFKRGIPMIPTHNLLGYTKDQYGRVVIDETEAKIVRLIYDSYIEGMTASEIASTLMTNHIPTVTGLERWTSLAVYNILRNEKYKGEIIMQKTYTVDCFSHKTRKNNGEKPKYRLKNGIPSIIPESRWDLVQELLKQPRRKSKSTSEIFVPKLYIKKLKSGKLRDFVVLDPSWKSEDIHEVFK

SEQ ID NO: 2796 - protein, 370 aa, Artificial Sequence
  Description of Artificial Sequence: Synthetic polypeptide
MVRRNSKITRQQKKIRDAFISERTVEIIPAKREFTDVKTKKLRVAAYCRVSTFDESQSGSFELQKQTYTERINSNPDWIMAGIYADQGASGTSIKRREQFQQMLHDCRSGKIDLIIVKSVSRFARNQLDFISIYRELKALSPPVGIYIEDINLNTLDTKSEFILGIMAIVAQGESEQKSASITWSVIERFKRGIPMIPTHNLLGYTKDQYGRVVIDETEAKIVRLIYDSYIEGMTASEIASTLMTNHIPTVTGLERWTSLAVYNILRNEKYKGEIIMQKTYTVDCFSHKTRKNNGEKPKYRLKNGIPSIIPESRWDLVQELLKQPRRKSKSTSEIFVPKLYIKKLKSGKLRDFVVLDPSWKSEDIHEVFK

SEQ ID NO: 2797 - protein, 367 aa, Artificial Sequence
  Description of Artificial Sequence: Synthetic polypeptide
MIQAHPDWELVGIYYDEGISGKEQSNRQGFLNLIKDCEDGKIDRIITKSIARFGRNTVELLTTVRQLRLKNIGVTFEKENIDSLSSEGELMLTLLASVAQEESQNLSENIRWRIQKKFEKGIPHTPQDMYGYRWDGEQYQIEPNEAKVIRKVFKWYLDGDSVQQIVDKLNQEQVLTRLGNPFTVASIREFFKQEAYFGRLVLQKTYREAFSRNPKRNKGQRNKYIIENAHEPIVTKEYFDLVLHEKERRNQLMHQESHLNKGIFRDKISCSECGCLMIVKVDSKQVNKTVRYYCRTRNRFGASSCSCRTLGEKRLLASFKSKLGIVPDKEWVENNIKHIEYDFGYRILRVTPVKGRKYLIEIREGRY

SEQ ID NO: 2798 - protein, 361 aa, Artificial Sequence
  Description of Artificial Sequence: Synthetic polypeptide
MKKVITIQATPSIIRSSSDDFSLKKRRVAGYARVSTDHEDQATSYESQMRYYSEYINGRDDWEFVKMYSDEGISGTNTKLRTGFKAMVEDALNGKIDLIITKSVSRFARNTVDSLTTVRQLKEVGVEIYFEKENIWTLDSKGELLITIMSSLAQEESRSISENVTWGLRKQFAEGKVHFPYTNVLGFKAGEDGAIVVDQDEAKTVRYIFQQALIGKSPYHIAKDLTEQGILSPSGKSHWNATTIKRMLRNEKYKGDALLQKTYTIDFLTKKKNINRGELPQYYVENNHEAIVDRETFDAVQQVLDNKGRKSSTTIFSSKLVCGDCGHFFGSKVWHSTSKYRRVIYQCNDKYKSSGKKSIES

SEQ ID NO: 2799 - protein, 360 aa, Artificial Sequence
  Description of Artificial Sequence: Synthetic polypeptide
METNKQNEIRNAYEHSAQVQCIPASIKKTTEHSEEDPLVVAPYCRVSTDNKDQLASYELQCQYYKEYVSKHPGWRLYDIYADEGISGTSVKKRTDFLRMIDDCKAGKIDMIIVKNIARFARNVVDCVATVRMLKALDKPVAVYFEDIAINTLTQTGELLMVVMAAIAQGESEAKSESVKWGFQKRFEKGLPKLADLYGYTRDKRLLEIYEPEANVVRLIYQMFYDDKTIPEICYILNQQGIPSPRGGQWTYSTVKTILTNEKYSGDVLMQKTVTVDIFSHRSIRNDGRANQFFIQGYHEAIIPRELWLEVQQILKGENVVPVPSVDEVADLSASDVPRILDGFFVIKPRKDGNNEYLRQL

SEQ ID NO: 2800 - protein, 358 aa, Artificial Sequence
  Description of Artificial Sequence: Synthetic polypeptide
MRKVAIYSRVSTINQAEEGYSIQGQIEALTKYCEAMEWKIYKNYSDAGFSGGKLERPAITELIEDGKNNKFDTILVYKLDRLSRNVKDTLYLVKDVFTANNIHFVSLKENIDTSSAMGNLFLTLLSAIAEFEREQIKERMQFGVMNRAKSGKTTAWKTPPYGYRYNKDEKTLSVNELEAANVRQMFDMIISGCSIMSITNYARDNFVGNTWTHVKVKRILENETYKGLVKYREQTFSGDHQAIIDEKTYNKAQIALAHRTDTKTNTRPFQGKYMLSHIAKCGYCGAPLKVCTGRAKNDGTRRQTYVCVNKTESLARRSVNNYNNQKICNTGRYEKNTSKNMLLMFFINFNTIKNILKK

SEQ ID NO: 2801 - protein, 351 aa, Artificial Sequence
  Description of Artificial Sequence: Synthetic polypeptide
MDMDAQVHRATYPKIAYRLMERDFSGWDRANMQSAWADAVIRGDLCTPEELMERDTVSIKEWMGVLDIGVDCWAEHFPVLLMTETGIESMGLGAAYLVVAPDMRSVVTGFSLHWPNIDTNLTIDIENAKGGLNFRLYYHTLSGWVGACFNASAIGLFRKALIAVSGLRTGDGHTVTIHCDKPESGYLYEEHLKCPVTWEKRDDGKLGMTFFVPDHVLDRKNPHSDPAMYEYMSETLWQRTTAISKRAGESTSYTSLVRLTLSSSMKIPSQQEVADRHQWSVRSLQQNLKDEGSSWQELLDTEIINRAKVALSGGSSVDAAAASLGISPSNFRRKFKAVTGQTPNKYQANYD

SEQ ID NO: 2802 - protein, 350 aa, Artificial Sequence
  Description of Artificial Sequence: Synthetic polypeptide
MDLQKICDRISQEFETDIVMGANLLIQMIQRQKITSDTPVQVVPAVKAVPTVQPVQPVQAVPAVQAVQPVQVVPAIKAVPAIQPVQAVQAVSTVQPVKAVQPVQPVQPVQPVQPVQAVQAVSTVQPVKAVQPVQPVQPVQPVQPVQPVQPVQPVQPVQVVQPVQAVQAVQPVQVVPAVRAVPAVQPVQTVQPVQTGNLSQSVQVPEINPVLFSYLVPLIPLIQMYHIAQKNDVPKNPQVQKQDACQPTSDGKFKIPINNTKTIKKSTSEKSTSEKKTIPKKRTSLKYVKRSRLSEKERNLLESQYSKDKYASPEIRDELAKKIGKSPRQIQIWFQNRRCKDRKLFFEKNN

SEQ ID NO: 2803 - protein, 344 aa, Artificial Sequence
  Description of Artificial Sequence: Synthetic polypeptide
MDRILVKSISRFARNTLDCIKYVRELKELGIGVTFEKENIDSLDSKGEVLLTILSSLAQDESRSISENSTWGIRKKFERGVVQVNTTNFMGYDKDEKGNLIINHEQANVVRYIFDRFLEGYSPEFISKELRKQEIPGCTGKARWCPSAIWKMLKNEKYKGDALLQKTYTVDFLTKKRIDNDGQVNQYYIENNHEPILDREKWEIVQLEIARRKKFREQHKLQFYIMQKENNPFTTKVFCAECGSAFGRKNWTTSRGKRKVWQCNNRYKIKGQIGCLNNHIDEEMLEKAVMMAVSILKENRELLQSKWNKLIETDSRLKQYYSNRLRDIVSRKNGILMGLKCAGF

SEQ ID NO: 2804 - protein, 342 aa, Artificial Sequence
  Description of Artificial Sequence: Synthetic polypeptide
MAAITRRRWEKEEDESLVNLVLEKTKKGETLDYIFGLASAKLNRTILACSNRWYDHFHDTYQAELAIVKQGNPTTNDYSGPWTAHDEERLLENMVSFLIQDLGVIDSLKRSAQILKRSLQSCSNRWYNNVLKKNKLTVENMVAQGKKAAAMIKEESEVQEKVQDPQQKENRTFKNQRGLLTQKQLDGWSPEKRFEFYKMMRLAEICGHNLDDILALAAVTYNKSKSECEMTWENYFKDDEILKAMFEKEQNEKAENEVREEQSTMELEDVIPEDYTIKVEEDSTQKEVITEAVMNPEEILGLVKSLIARNKELEAEVKELRGIRVKKEEYEAILVKIQSLVK

SEQ ID NO: 2805 - protein, 340 aa, Artificial Sequence
  Description of Artificial Sequence: Synthetic polypeptide
MVTFETVMEIKILHKQGMSSRAIARELGISRNTVKRYLQAKSEPPKYTPRPAVASLLDEYRDYIRQRIADAHPYKIPATVIAREIRDQGYRGGMTILRAFIRSLSVPQEQEPAVRFETEPGRQMQVDWGTMRNGRSPLHVFVAVLGYSRMLYIEFTDNMRYDTLETCHRNAFRFFGGVPREVLYDNMKTVVLQRDAYQTGQHRFHPSLWQFGKEMGFSPRLCRPFRAQTKGKVERMVQYTRNSFYIPLMTRLRPMGITVDVETANRHGLRWLHDVANQRKHETIQARPCDRWLEEQQSMLALPPEKKEYDVHLDENLVNFDKHPLHHPLSIYDSFCRGVA

SEQ ID NO: 2806 - protein, 337 aa, Artificial Sequence
  Description of Artificial Sequence: Synthetic polypeptide
MKTAIIYCRQSNKKNSRHGMVSNMSMKELSLDSQEEMCKLFCNTNGYNILKIIRETTSGRDMTRMEQLQEIINKMSPGQTLIVYDTTRFSRNTLQALSILDKFDKKNIHIYSVSEKCGYDTTQDRNIMRMLLSKSELESDQISDRIKRSVEFRKSKGIKIGQSTFGYESFYDNNGMRKERINSQEMQIIDQINKYLSNNKNYNYIAQQLNRQKKFYREKEWTAQNLKYVINTFKKKQILNSEQKNCSHHMDEKEDCNQYDDNGDEDNEDYQVSETENETENDEKDKEYKDTTYYNLKRKNPSDNDDIIEQKNKKQKITYEPLRRSERIKNMEEKLNN

SEQ ID NO: 2807 - protein, 330 aa, Artificial Sequence
  Description of Artificial Sequence: Synthetic polypeptide
MIEDVFIKNGIEFLSLQENFDTSTPFGKAMIGLLSVFAQLEREQIKERMQLGKLGRAKAGKSMMWAKTSYGYDYHKETGTMTINPVQALAIKFIFESYLSGRSITKLRDDLNEKYPKEKPWNYRAVRVILDNPVYCGYNQYLGEIYKGNHEPIISKETYDKTQEELKIRQRTALENLNPRPFQAKYMLSGIAQCGYCLAPLKIIMGVKRKDGSRFKKYECHQRHPRKLRGVTTYNDNKKCDSGFYYKDDLEAYVLQEVNKLQHDSEYLETIFSDNRKESIDRESYQKQIRELSKKLSRLNDLYIDDRITLEELQSKSSEFLSMRALLEKS

SEQ ID NO: 2808 - protein, 328 aa, Artificial Sequence
  Description of Artificial Sequence: Synthetic polypeptide
MLITKKTHTRSANMSYNHLTLTERARIEVLRQENYSLRSIARKLKRSVSTISREISRNNLNQSYQAETAQKNYETKRKLCGRPTRFTPELGNIIKYYLKCHWSPEQIVGRLLQNQICFKTIYRWINSNMINFELISCLRQKGKRQKPKETRGKFNIGRPISQRPKEIKKRNTFGHWEADTIVSSRGKSKGCIATFAERKSRYYYCVLMPDRSSNSMETAINNLIKHLPKGAVKTITVDRGKEFSCYQNIENQFNINVYFADPYSAWQRGTNENTNGLLREFFPKKTDLAKVNQEQLNYALDSINYRPRKCLNWKFPYEVLCDELLHLN

SEQ ID NO: 2809 - protein, 328 aa, Artificial Sequence
  Description of Artificial Sequence: Synthetic polypeptide
MLITTKTHTRSANMSYNHLTLTERARIEVLRQENYSLRSIARKLKRSVSTISREISRNNLNQSYQAKTAQKNYETKRKLCGRPTRFTPELGNIIKYYLKCHWSPEQIVGRLLQNQICFKTIYRWINSNMINFELISCLRQKGKRQKPKETRGKFNIGRPISQRPKEVKKRNTFGHWEADTIVSSRGKSKGCIATFAERKSRYYYCVLMPDRSSNSMETAINNLIKHLPKDAVKTITVDRGKEFSCYQNIENQFNINVYFADPYSAWQRGTNENTNGLLREFFPKKTDLAKVNQEQLNYALDSINYRPRKCLNWKFPYEVLCDELLHLN

SEQ ID NO: 2810 - protein, 323 aa, Artificial Sequence
  Description of Artificial Sequence: Synthetic polypeptide
MSGIYKISFNGNNKRDCYIGQAQDFTARMYNHRHHLRRGTHFAPKLQRAYDENGHENMRVEILELCEVEVLTQREQHYLDTIKPRYNPTLIASEPPMRGKAHSDDAKQRISDAVRKFSHKQELAIVSSHIGLGFSTTTIALQFGCSEPTIRTILRKHGIDTGASRRPKGRAKKAGRKVKFDAAQEQAIARSYQSGKSTAEVAQEFGCSQPTVVKMLDKLGIERRRGQFNETEQQDIVRQYKNGKTTEDIAAQYGCNHSTIGDELRRAGVELRGRGRKRLLTDKQERQALALRDKGRSVSEVAAKFGCSPQAMRNILNKHRESA

SEQ ID NO: 2811 - protein, 314 aa, Artificial Sequence
  Description of Artificial Sequence: Synthetic polypeptide
MNERKDIVENVTVIQKQRAIKDYAVGIYARVSTSHKAQMDSLSAQVSGLTRLAAVHRTWFVADIFIDVASAKTGSTRSEFNRMINECEHGNLDIILTKSLSRFGRDAKEGLEAIRRIRAAGKRIIFEKDKIDTETVKDELLISIIEACDQAENDWRSENIRLGLKYRAEDGTSGLYNRACYGYKKDKNGMLIIDEEEARVVRRIYDWYLEGYSIGGIIDKLEEKKIKTSKGKERWSKRAIESTLTREKYTGDVAIADPGGSENRYLYKQHHEGIISKEQFKAVQLEMELRSNVEIGEDGKARRKSKKYSSKILK

SEQ ID NO: 2812 - protein, 313 aa, Artificial Sequence
  Description of Artificial Sequence: Synthetic polypeptide
MKTVKKIQQIRPVKNKKLRVAAYARVSHSELLQSLSNQVSYYSELIQNHSEWEYKGVYVDSAITGRNIKQRKEYQRLIQDCKEGKIDVILTKSISRFGRNTIDLLKTIRELRRLNVSVRFEKENIDTMTTDGELLLTLLVSIAEEESKAIGQNIKWRVKEKFQQGLPHSPQDMYGYRWQEDAYVIEPHEASIIQQIYEWYLNGYSPTQIAKILNEKREKTRKGNAFTRSVIHNILSQDTYTGRLILQKTYRVAHKGRSVMNQGEHTKYIVEQAHEPIISKEQFEEVQQVKATRSNHYQKGAKHGEKDCHHRSS

SEQ ID NO: 2813 - protein, 309 aa, Artificial Sequence
  Description of Artificial Sequence: Synthetic polypeptide
MIYRISMVSCTLLHNYKFVVYMFTFPNGKSYIGRTCDFTRRLRTHLKKSSGCKYVRNCFNKYGRGSVDITILKKGLKGAYLANQWEKFFIASFDTLAPKGLNMTPGGDGVCFTQEICDKISKALKGRKLSKEHRLACSIAHKKRWATYTISEYTRNKLRNVNKGRKFTKEHCLNISKARKALNIRLTAEQKQHLRNINMGKKMDPEVVRRTVAKRIANGNHLHTQATKDRIAYAKRGISLSEEHKQNLRIGHQNSTFDHSTKRKYKDEEILRVLKECDQDRNKAASILNVHYNTVFRCLKRNNLTKICS

SEQ ID NO: 2814 - protein, 307 aa, Artificial Sequence
  Description of Artificial Sequence: Synthetic polypeptide
MTKEVWGEIEGYPNHKISSLGRLKSFGVKKEGVIINGFVDKDGYRRHFMRYKNKSKNKLAHRLVAETFIPNPENKTQVNHKDGNKLNNKVDNLEWCNCQENITHACKTGLRKNKGEHNIKSKLKGYEVNQIKHALSSGVKPKDLAKEYGVTRSTIYDIKNKKTWFGYNENLEIKLLSNNAILPKRANDFDSGLDLYVSETTTIKAGETKAVKTDVAINLPHGYEAQVRPRSGKSLKTKLRVALGTIDQTYNKEIGIITDNIGDEDIAVEKGERLAQLVVAPVAYPTPKQVDWFENESDRGAYGSTGE

SEQ ID NO: 2815 - protein, 307 aa, Artificial Sequence
  Description of Artificial Sequence: Synthetic polypeptide
MVLWEEAVNEKDPSNKLRLIALIYGLQIFSFLLLRPILRSILRIGLSFSFLKYILFAVFTSITFLISFEEFWSLTFFGGILTFAVALFLSAESSFVIFKQKLGFRPHFFSLIPLSLGFIFFGNVLANLFLNGNLNYLSYLVYDIILIFIFKKYRRTQDLKPDKSPDDLQINPLADIISKQSAPRDTLFLRDRDLANLESRLESFIKEKLFLKPNLSQGDLADYLGLSRYETSRYLNLYKRVSFYDLINKLRIQEAQKLIAENISNLTQIASLTGFGSYATFFKAYLKFAGSIPKNALDERKRDRFES

SEQ ID NO: 2816 - protein, 305 aa, Artificial Sequence
  Description of Artificial Sequence: Synthetic polypeptide
MKRGIEVNIIKSFNNTIDYLETVLDDEIDEKKVAQLSGYSYSMVSRLFSILTETTLSEYLRSRRLTEAAVILRDTDEKIIDVAFKFGYESSDSFGTAFKNFHGFTPSEVRNGKPFKLVSRVQLSLSVRGGRSMNITIQKKKAFTVAGINENSINSSLCSGIWGKLFSKVSHEEISKFGTGESVGVCHDILNLDNHDVLESNTISYMAGYIVNDVDKARSIGLDVLEVEEAEYAVVELIGSVPDCIHNGWKYALEVSSLSMGMFISGKPDFDIIIEGDMDSKDYKMELWIPITKAKKIPVNLSDTF

SEQ ID NO: 2817 - protein, 305 aa, Artificial Sequence
  Description of Artificial Sequence: Synthetic polypeptide
MKQIRKIIQIRLPEQKKLKVAAYARVSHTRLLQSLSNQVSYYNQIIGKNPEWEFKGVYVDEVISGRNASKRKEYQRLLSDCRKGEVDIILTKSISRFGRNTVELLKTIRELKQLNISVRFEKENIDTLTTDGELLLTLLSTLAEEESKAISENIKWKVKKQFEQGLPYIKQDMYGYRFKETKYEIEPREAEVVKQVYAWYLEGEQPTFIARKLNEQGIKTRKGNRFSRSIIHRILGQEAYTGTLVLQKTYHVGHKGRSVENKGERTKYIVENAHEAIISREMFEEVQQEKARRSLHNKKKEGRHD

SEQ ID NO: 2818 - protein, 304 aa, Artificial Sequence
  Description of Artificial Sequence: Synthetic polypeptide
MYSKTHKRCDVLLCSILTQNWSKKQMSKKAAIYTRVSTTNQAEEGYSIDEQIDKLKMYCEAMDWKVSEIYTDAGFSGSKLTRPGMEKMITDIGLKKFDTVIVYKLDRLSRSVRDTLYLVKDVFTKNEIDFISLSESIDTSSAMGSLFLTILSAINEFERENIKERMTMGKIGRAKSGKSMMWAKTAFGYSHNQETGILEINPLEASIVEQIFNEYLKGTSITKLRDKLNEDGHIAKELPWSYRTIRQTLDNPVYCGYIKYKNNTFEGLQSSDLSDILLLLPNLSLLLPNLTCVSKLDTSCIHFV

SEQ ID NO: 2819 - protein, 298 aa, Artificial Sequence
  Description of Artificial Sequence: Synthetic polypeptide
MSLRAYGWTNDGKIVESEADEIRSWARHVIDGGAIRPLVAELNERGVATVTGKSWAAPTITRALTAPRMVGLRERNGELEDAPIEPILDRDTWDEVVAILTDPARKKFASRKNPPTLLAGILQCGRCGRNLHATGPSYACSARYGGCGEISTSQRLADTEVTERVLIRITGDEWLTALSDARRESAETFETTIAEAENRMVHLAEVFGEGGNQQAFDAGVAKAREVAEEARGRIALLDATAALPATVTDAEVVEWWADAPIDTRRQVIRVVVDHIDVRAKADAEPGAGVGDRMHFHWA

SEQ ID NO: 2820 - protein, 298 aa, Artificial Sequence
  Description of Artificial Sequence: Synthetic polypeptide
MSLRAYGWTNDGKIVESEADEIRSWAQHVIDGGAIRPLVAELNERGVATVTGKSWAAPTITRALTAPRMVGLRDRNGELEDAPIEPILDRDTWDEVVAILTDPARKKFASRKNPPTLLAGILQCGRCGRNLHATGPSYACSARYGGCGEISTSQRLADTEVTERVLIRITGDEWLTALSDARRESAETFETTIAEAENRMVHLAEVFGEGGNQQAFDAGVAKAREVAEEARGRIALLDATAALPATVTDAEVVEWWADAPIDTRRQVIRVVVDHIDVRAKADAEPGAGVGDRMHFHWA

SEQ ID NO: 2821 - protein, 298 aa, Artificial Sequence
  Description of Artificial Sequence: Synthetic polypeptide
MSLRAYGWTNDGKIVESEADEIRSWARHVIDGGAIRPLVAELNERGVATVTGKSWAAPTITRALTAPRMIGMRERDGELEDAPIEPILDRETWDEVVAILTDPARKKFASRKNPPTLLAGILRCGRCGRNLHATGPSYACSARYGGCGEISTSQRLADTEVTERVLIRITGDEQLEQIREARERTAGHYEQQIAEAEDRITHLADVFGSGAQHREAFDTGVGSAQQVIDAGRAQLALIHTFAAVEHVTEDEVAAWWSDAPLDVRRDVIRVVIDHIDVRAKADAEPGAGVGDRMHFHWA

SEQ ID NO: 2822 - protein, 298 aa, Artificial Sequence
  Description of Artificial Sequence: Synthetic polypeptide
MSLRAYGWTNDGKIVESEADEIRSWARHVIDGGAIRPLVAELNERGVATVTGKSWAAPTITRALTAPRMVGLRERNGELEDAPIEPILDRDTWDEVVAILTDPARKKFASRKNPPTLLAGILQCGRCGRNLHATGPSYACSARYGGCGEISTSQRLADTEVTERVLIRITSDEWLTALSDARRESAETFETTIAEAENRMVHLAEVFGEGGNQQAFDAGVAKAREIAEEARGRIALLDATAALPDTVTDAEVVEWWADAPIDTRRQVIRVVVDHIDVRAKADAEPGAGVGDRMHFHWA

SEQ ID NO: 2823 - protein, 298 aa, Artificial Sequence
  Description of Artificial Sequence: Synthetic polypeptide
MSLRAYGWTNDGKIVESEADEIRSWARHVIDGGAIRPLVAELNERGVATVTGKSWAAPTITRALTAPRMVGLRERDGELEDAPIEPILDRDTWDEVVAILTDPARKKFASRKNPPTLLAGILRCGRCGRNLHATGPSYACSARYGGCGEISTSQRLADTEVTERVLIRITGDEWLTALSDARRESAETFETAIAEAENRMVHLAEVFGEGGNQQAFDAGVAKAREVAEEARGRIALLDATAALPDTVTDAEVVEWWADAPIDTRRQVIRVVVDHIDVRAKADAEPKAGVGDRMHFHWA

SEQ ID NO: 2824 - protein, 298 aa, Artificial Sequence
  Description of Artificial Sequence: Synthetic polypeptide
MSLRAYGWTNDGKIVDSEADEIRSWAQHVIDGGAIRPLVADLNDRGVATVTGKSWAAPTITRALTAPRMIGMRERDGELEDAPIEPILDRETWDEVVAILTDPARKKFASRKNPPTLLAGLLRCAKCGRNLHATGPSYACSARYGGCGEISASQRLADNEVTERVLIRITGDEWLAALSDARRESAETFETTIAEAENRIVHLAEVFGEGGNQQAFDAGVAKAREVAEEARGRIALLDATAALPAAVTDAEIVQWWTDAPIDTRRQVIRVVVDHIDVRAKADAEPGAGVGDRMHFHWA

SEQ ID NO: 2825 - protein, 298 aa, Artificial Sequence
  Description of Artificial Sequence: Synthetic polypeptide
MSLRAYGWTNDGKIVESEADEIRSWARHVIDGGAIRPLVAELNERGVATVTGKSWAAPTITRALTAPRMVGLRERNGELEDAPIEPILDRDTWAEVVAILTDPARKKFASRKNPPTLLAGILQCGRCGRNLHATGPSYACSARYGGCGEISTSQRLADTEVTERVLIRITGDEWLTALSDARRESAETFETTIAEAENRMVHLAEVFGEGGNQQAFDAGVAKAREVAEEARGRIALLDATAALPATVTDAEVVEWWADAPIDTRRQVIRVVVDHIDVRAKADAEPGAGVGDRMHFHWA

SEQ ID NO: 2826 - protein, 286 aa, Artificial Sequence
  Description of Artificial Sequence: Synthetic polypeptide
MTNHTKYTTNPIDTIYVYTRVSTKAQHDKHSFKNQIFSCQQYLNECYPNHQNVSLKYSDIGSNYNDKNILYGLNELIKKLPNNSLIIVSDISRLGRNYKHTQRIFKKVQRTNSFIMSVHGNICYGINERMDKEFRNIAKISKKDSDLKAYYAKATHNRIKAAGGYPGGRTPYGYKTIRDNDNIPFLHENNQERTIINKMIEYEINEYTHKEIADALNANSILNRKNLWTQKSVKNILDRENQKYKPIHISSYNTRQYALNTEYPFNSNTDITTTRPFKRRHSISST

SEQ ID NO: 2827 - protein, 283 aa, Artificial Sequence
  Description of Artificial Sequence: Synthetic polypeptide
MNKVAIYVRVSTTNQADEGYSIDEQIDKLKAYCEIKDWVVYKVFTDAGFTGSNIERPAMTKLISAAKKKQFDTILVYKLDRLSRSQKDTLYLIEEIFIKNGIDFLSLSENFDTSSAFGKAMIGILSVFAQLEREQIKERMMLGKVGRAKSGKTMMWAHPAYGYTYNKETSSLDIVPAEAALIKKIYELYIKGKSISKLRDYLNDNKIFVNKSVPWSHRTISYALTNPVYCGMIRYEGKLYDGLHEPIITKELFNKTQEVLAERRMEASKKILDLSNQNICYQE

SEQ ID NO: 2828 - protein, 275 aa, Artificial Sequence
  Description of Artificial Sequence: Synthetic polypeptide
MAKNKQTAIAYYRVSTAKQGAEGNGIEAQRAAVERLVDTHHFKIAAEFTEVESGTRKRRPELVKALAACREQQATLLIAKIDRLARNVAFIATLMESGVGFKCADMPEIDKFTIHILAAVAEREAELISARTEEALSVVKAKLGEGSHVSKSGRTIEKLGAPDTRIGAAAAGKSHPLAADQYAQSIAKDIDCACAKGKPESLRDLAEILTGRGVPTRQQWWLKSQTTRVDPARKARVQAAVWHPSSVRNVLKRLQSLEKLPESAAFLVVREDAAA

SEQ ID NO: 2829 - protein, 273 aa, Artificial Sequence
  Description of Artificial Sequence: Synthetic polypeptide
MILLGDTLYIKEKHHPRGFLIMSTVRHIAYRRVSTVQVRNGKAQSTERQMHNLGIDFDLEFEDHVTGTKFEARKQLQECLNTLQKEDHLHIHSIDRLARNTKDLLSIVEDLIARKVVVHFHKEGLVFGGDSDPMQAAIGQVLLSVIGAIHTFQATMIQESVKEGLRVAKSKGIKLGGANPKWKESMEKNKHNHKTTRLSEESKIKRSPVTQMIKDMIDYSQNRLTLDEIASNLNNKGITTSQGKSFSKATVSRIIKQDGLDYKKKNKYTTISA

SEQ ID NO: 2830 - protein, 266 aa, Artificial Sequence
  Description of Artificial Sequence: Synthetic polypeptide
MSQCAASPNCSKTPSKFKRGMCGAHHRAYLRRARDEGVWRGHVPAGPVQEHLKALADAGVSAQRVSWVTGLSLNTLLQIPERESLWSTTADKIFAVRVDGNFREGGRGMIPVLGSRRRLQSLHSRGFTVAHLAERLGMSVTATTRILRPDDPRSVDRVESGTARKIDALWRELQLAAPPQGPACTKARRRAAKLGWPDPLAWEENEIDDPRARPRIDPTHLTKGRLEEYKKLRDQGLTKKEIAKRFNLNESTLYDWINRQKAKGNL

SEQ ID NO: 2831 - protein, 266 aa, Artificial Sequence
  Description of Artificial Sequence: Synthetic polypeptide
MSQCAASPNCSKTPSKFKRGMCGAHHRAYLRRARDEGVWRGHVPAGPVQEHLKALADAGVSAQRVSWVTGLSLNTLLQIPERETLWSTTADKILAVRVDGNFREGGRGMIPVLGSRRRLQSLHSRGFTVVHLAERLGMSITATTRILRPDDPRSVDRVESGTARKIDALWRELQLAAPPQGAACTKARRRAAKLGWPDPLAWEENEIDDPRARPRIDPTLLTKGRLEEYKRLRDEGLTKKEIAKRFGLNESTLYDWINRQKKKGNL

SEQ ID NO: 2832 - protein, 266 aa, Artificial Sequence
  Description of Artificial Sequence: Synthetic polypeptide
MSQCAASPNCSKTPSKFKRGMCGAHHRAYLRRARDEGVWRGHVPAGPVQEHLKALADAGVSAQRVSWVTGLSLNTLLQIPERESLWSTTADKIFAVRVDGNFREGGRGMIPVLGSRRRLQSLHSRGFTVAHLAERLGMSVTATTRILRPDDPRSVDRVESGTARKIDALWRELQLAAPPQGPACTKARRRAAKLGWPDPLAWEENEIDDPRARPRIDPTLLTKGRLEEYKKLRDQGLTKKEIAKRFNLNESTLYDWINRQKAKGNL

SEQ ID NO: 2833 - protein, 266 aa, Artificial Sequence
  Description of Artificial Sequence: Synthetic polypeptide
MSQCAASPNCSKTPSKFKRGMCGAHHRAYLRRARDEGVWRGHVPAGPVQEHLKALADAGVSAQRVSWVTGLSLNTLLQIPERETLWSTTADKILAVRVDGNFREGGRGMIPVLGSRRRLQSLHSRGFTVAHLAERLGMSITATTRILRPDDPRSVDRVESGTARKIDALWRELQLAAPPRGAACTKARRRAAKLGWPDPLAWEENEIDDPRARPRIDPTLLTKGRLEEYKRLRDEGLTKKEIAKRFGLNESTLYDWINRQKKKGNL

SEQ ID NO: 2834 - protein, 266 aa, Artificial Sequence
  Description of Artificial Sequence: Synthetic polypeptide
MSQCAASPNCSKTPSKFKRGMCGAHHRAYLRRARDEGVWRGHVPAGPVQEHLKALADAGVSAQRVSWVTGLSLNTLLQVSERETLWSTTADKILAVRVDGNFREGGRGMIPVLGSRRRLQSLHSRGFTVAHLAERLGMSITATTRILRPDDPRSVDRVESGTARKIDALWRELQLAAPPQGAACTKARRRAAKLGWPDPLAWEENEIDDPRARPRIDPTLLTKGRLEEYKRLRDEGLTKKEIAKRFGLNESTLYDWINRQKKKGNL

SEQ ID NO: 2835 - protein, 266 aa, Artificial Sequence
  Description of Artificial Sequence: Synthetic polypeptide
MSQCAASPNCSKTPSKFKRGMCGAHHRAYLRRARDEGVWRGHVPAGPVQEHLKALADAGVSAQRVSWVTGLSLNTLLQIPERETLWSTTADKILAVRVDGNFREGGRGMIPVLGSRRRLQSLHSRGFTVVHLAERLGMSITAATRILRPDDPRSVDRVESGTARKIDALWRELQLAAPPQGAACTKARRRAAKLGWPDPLAWEENEIDDPRARPRIDPTLLTKGRLEEYKRLRDEGLTKREIAKRFGLNESTLYDWINRQKAKGNL

SEQ ID NO: 2836 - protein, 266 aa, Artificial Sequence
  Description of Artificial Sequence: Synthetic polypeptide
MSQCAASPNCSKTPSKFKRGMCGAHHRAYLRRARDEGAWRGHVPAGPVQEHLKALADAGVSAQRVSWVTGLSLNTLLQIPERESLWSTTADKIFAVRVDGNFREGGRGMIPVLGSRRRLQSLHSRGFTVAHLAERLGMSVTATTRILRPDDPRSVDRVESGTARKIDALWRELQLAAPPQGPACTKARRRAAKLGWPDPLAWEENEIDDPRARPRIDPTHLTRGRLEEYKKLRDQGLTKKEIAKRFNLNESTLYDWINRQKAKGNL

SEQ ID NO: 2837 - protein, 266 aa, Artificial Sequence
  Description of Artificial Sequence: Synthetic polypeptide
MKVAIYVRVSTTLQAEIGYSIDEQRAKLEAFCSLKEWMPYKVYTDRGISGSTINRPALNCLIDDALNHLFDCVLVYDLKRLSRSQRDTLYLIEEIFEKNNIAFVSLTENFDTSTAFGKAIVGILSAFGQLEREQIKERMQLGKIGRAKTGKPMTWSDKFCPFGYAYIDDEYKTNEYSRWVKYIFDRFLAGDTINTIANDMTSRKILNKKWHYTTVKWILENPVYTGKIRWRGKLYQGNHKAIISQEAYDLAQKMIPATKRSPNILK

SEQ ID NO: 2838 - protein, 262 aa, Artificial Sequence
  Description of Artificial Sequence: Synthetic polypeptide
MTTQSTLTVARAYVRVSTESQTLSGHSLETQETRIKDYCTYKKLNLIKVYCDSGISAKEMTKRPALLQLLEDAKKGEVIIVSDLSRLSRSTKDSLTILESLREKGVQLCCLNPDIDFTTSTGMFTFTILAAINKMERERIAYNVSVNLQRLSQEGHLRSSPPFAFRFVAKDKPFEPVPEQQEVILKIIEFFKEDPCISRVVDKLNEEGYNKVLNLNKKTITKERKFTRYLVTTILVDYNVIEPSESMKGRKSIEERIKSRSE

SEQ ID NO: 2839 - protein, 260 aa, Artificial Sequence
  Description of Artificial Sequence: Synthetic polypeptide
MNNTNYSKNAGTALDAGMALDADMALDADMALAADGLVKLASSFRNNHLSSIALASSFGNNHPSENIQPIATPFLLYQTVSQNYPKLHLRNYPDLHLRNYPDLHLRNYPDLHLRFDNASLYAMQKICTSTPNASKENISLQQARPVLPISLAASDQAGRFMQSIASITENSHKNNSLSDFGRTVETPKKHTKINNTSRMILLSVYDKNKYISRAIKKQLAHRTGLTEKQIQNWFQNKRTSDKIKAENDKFMKSVTQKMNN

SEQ ID NO: 2840 - protein, 257 aa, Artificial Sequence
  Description of Artificial Sequence: Synthetic polypeptide
MSVKKIRVNKQKHKQRICAYIRVSTTNGSQLESLENQKHYFENLYSNRDDIDFVGVYHDRGISGSKDNRPNFQAMIENCRKGMIDIIHTKSIARFARNTVTVLEISRELKAIGVDIFFEEQNIHTLSSEGEVMLSVLASIAEDELRSMSGNQRWAFQKKFQRGELVINTKRFLGYDLDENGELIINPEEALIVRQIFALYLEGYGTHRIAKLLNEKGVATVTGAKWHDSTIRQMLSNEKYNGFGLIAEVFSRWCEWS

SEQ ID NO: 2841 - protein, 255 aa, Artificial Sequence
  Description of Artificial Sequence: Synthetic polypeptide
MKNNNKWSIEEEQQLANIVLSCMQNKKKLIEALREAEKEIPNRTFSACQTKWTDKVKFEYAEQIKEIKEKINAEKDIELKKHEMRKEKNKQENINKRKEKKFKSKEKNKTKKEVKIEKKKGRINTWSLEEDTILANSVLSYLQYRNSASQGIVVASRKLPNRSLEACKARWNTALRHEYRQQVSNIKAIKSKQWTGKEDSILLRGLEENSRNRVSFEQAIRYVNAELIKLGYDRSLSACKARWATIKYDYPYIMY

SEQ ID NO: 2842 - protein, 254 aa, Artificial Sequence
  Description of Artificial Sequence: Synthetic polypeptide
MSTDQDEQLSSYENQVNYYRDFISKHEDYELVDIYADEGISATNTKKRDALLQKTYTVDFLTKKRTENDGQVNQFYVANNHEGIIDNEMWETVQLEIARRKAFREEHGIPFYHLQNEDNPFMTKVFCTECGDAFGRKNWTTSRGKRKVWQRNNRYRITGVMGCSNNHIDEEMLEKAFMKAVNILQDHKADVLDKLERLRKGDNLLHKHYAKFMKQLLDIDHFDCTIMCQVLDNITISESGQITVAFLEGTEVDL

SEQ ID NO: 2843 - protein, 253 aa, Artificial Sequence
  Description of Artificial Sequence: Synthetic polypeptide
MNIRKIEAKNNNRKKRICAYVRVSTTNGSQLDSLENQKVYFEKLYAERDDVEFLGVFCDKGISGSKYDRPDFQTMLDACRKGQIDVIHTKSISRFARDLINVLEISRELKTLGIDIFFEEQNIHTLSNEGEVVLTVLASLAEEELQSMSGNQRWSFRRKFQKGELLINAKRFLGYDLNEKGELVINKAEAQIVRTIFYSYLEGMGTHRIAKKLNEGKVPTVTGKKWYDSTIRNILKNENTKDLYYFKNTFMMV

SEQ ID NO: 2844 - protein, 252 aa, Artificial Sequence
  Description of Artificial Sequence: Synthetic polypeptide
MTRGKCRRSGCSNLTRSSGGKAFCDKHRKAMGPTGYVDPAPAIEHLNLLHERGMSWDAISEVLGMSRRGTQLVRLGKSTRMQAKTVQRILGIPVPEKFVDEGMCPVNPIGARRRIGALMALGHSHRDISKAAGIHQNQLWRVFRNDSIRSSTARAISDVFGWMQFETGGSIRSKRWAQEHGYPTPFSWEENEIDDPRARPRIDPTLLTKGRLEEYKRLRDEGLTKKEIAKRFGLNESTLYDWINRQKAKGNL

SEQ ID NO: 2845 - protein, 252 aa, Artificial Sequence
  Description of Artificial Sequence: Synthetic polypeptide
MTRGKCRRSGCSNLTRSSGGKAFCDKHRKAMGPTGYVDPAPAIEHLNLLHERGMSWDAISEVLGMSRRGTQLVRLGKSTRMQAKTVQRILDIPVPEKFVDEGMCPVNPIGARRRIGALMALGHSHRDISKAAGIHQNQLWRVFRNDSIRSSTARAISDVFGWMQFETGGSIRSKRWAQEHGYPTPFSWEENEIDDPRARPRIDPTLLTKGRLEEYKRLRDEGLTKKEIAKRFGLNESTLYDWINRQKKKGNL

SEQ ID NO: 2846 - protein, 251 aa, Artificial Sequence
  Description of Artificial Sequence: Synthetic polypeptide
MKYGKCRRPNCQNSTRSRGSNALCEKHLRTRPRGYVDPAKAVEHLNALHDKGMTWDAISDVLGMSRHALQRVRLGKTPRMQARTVQRILEVPIPGAPVAVGMAYVPSIGSRRRVGALMALGHARPDICRISGVHSSQMYTLFKKDVIRATTAKAVSDAFNRMQFETGSSIRSKKWAEAHGYPTPFSWEESEIDDPRARPRIDPTLLTKGRLEEYKKLRDQGLTKKEIAKRFNLNESTLYDWINRQKAKGNL

SEQ ID NO: 2847 - protein, 251 aa, Artificial Sequence
  Description of Artificial Sequence: Synthetic polypeptide
MRAFAYVRVSTEEQADSGHSIELQPARITSYCQTYGLELVDVITDPGVSGSTPLARRAGGRELLRRLEAGEAEGVVVVRLDRLFRDALDGLQFFARSRAVVHSVAERIDTGSPAGRLQLTILLATAQYERDIAAARATENTRGLRAAGRVYGSTPYGCVAIAGQLYRDPATWAQRELICEWRANGLPLQAIRERLREDRVQAPGGGTWWSKSTLSNLIATHHDLAHLPELPAHGAPADTARPDVEDSCATA

SEQ ID NO: 2848 - protein, 251 aa, Artificial Sequence
  Description of Artificial Sequence: Synthetic polypeptide
MKYGKCRRPNCQNSTRSRGSNALCEKHLRTRPRGYVDPAKAVEHLNALHDKGMTWDAISDVLGMSRHALQRVRLGKTPRMQARTVQRILEVPIPGAPVAVGMAYVPSIGSRRRVGALMALGHARPDICRISGVHSSQMYTLFKKDVIRATTAKAVSDAFNRMQFETGSSIRSKKWAEAHGYPTPFSWEESEIDDPRARPRIDPTLLTKGRLEEYKRLRDEGLTKKEIAKRFGLNESTLYDWINRQKAKGNL

SEQ ID NO: 2849 - protein, 250 aa, Artificial Sequence
  Description of Artificial Sequence: Synthetic polypeptide
MKQVNQVLSQVFPYVFNNIPENIKYAAIYCRKSNAGAGNELSFSVQKNICETFCKERNLEIICCVIETISGKNMNQMVELNELLQQIQKDTVIVVCDVTRFSRNVLQGLQAIDKLLKKDSTIYAVCNCCCYNDKYIDRHQFRSLLNQAELEHDQITDRINRSVKHRRRIGHKIGKAKYGYEIYYDNKGIRREKKHKLEQKTVSTIRRLLNSGKKLSDIVDYLNNANDANNDFRGKEWNTSRVKYVSKSSV

SEQ ID NO: 2850 - protein, 248 aa, Artificial Sequence
  Description of Artificial Sequence: Synthetic polypeptide
MRVLGRLRLSRSTEESTSIERQREIVTAWAQSNGHTLVGWAEDVDVSGAIDPFDTPSLGPWLDERRGEWDILCAWKLDRLGRDAIRLNKLFGWCQEHGKTVASCSEGIDLSTPVGRLIANVIAFLAEGEREAIRERVTSSKQKLREVGRWGGGKPPFGYMGVPNPDGQGHILVVDPVAKPVVRRIVDDILDGKPLTRLCTELTEERYLTPAEYYATLKAGAPRQKAEPDETPAKWRQPALRGRGLHHL

SEQ ID NO: 2851 - protein, 243 aa, Artificial Sequence
  Description of Artificial Sequence: Synthetic polypeptide
MIKKYVVYSRQSKKSGMKGQMTLETADAIIRHFLNTQGEEGVDYEVVKVFKEVSSSYGSKSANRINFNEAYELCKQNGYTLLVSTASRLARNTAFGAKIIEEIDVVIASNPTASKTMKNIMLVLAEDESIQQSERRRATYQAKKEKCKKLGIKCEWGGNSEKWREKYFANKAAGKHSTTKLFKPSPQKDKLVVDIKTAISYGSPKSFVELADKLNKNEVFTLGNKPWNGRSLATFSKRNGIEL

SEQ ID NO: 2852 - protein, 241 aa, Artificial Sequence
  Description of Artificial Sequence: Synthetic polypeptide
MYPVDKESRIRLMEDLDKWINEHYLEKVTVKDLSHQLGVFIPDVYRLFAEQRNTTPGEYLRRKRLVKAKALLESGIRPTLAGAHVGYSHFQSFVKEYKAYFKRHPREDYSDTLEVPTMDSYSKETMDRYYPSELREKILNYLRKNIKVNFNYADVEKKFGLPDRSLSEMFEHYYGKSYREWRKDTRMKLAKELLHKNPSVKISDLATTVGSCSATYLRKQYQEVYGVNIVELRETLRGVRV

SEQ ID NO: 2853 - protein, 241 aa, Artificial Sequence
  Description of Artificial Sequence: Synthetic polypeptide
MYPVDKESRIRLMEDLDKWINEHYLEKVTVKDLSHQLGVFIPDVYRLFAEQRNTTPGEYLRRKRLVKAKALLESGIRPTLAGAHVGYSHFQSFTKEYKAYFKRHPREDYTDSLEVPTMDSYSKETMDRYYPNELREKILNYLLKNIKVNFNYADVEKKFGLPDRSLSEMFEHYYGKTYREWRKDTRMKLAKELLHKNPSIKITDLATTVGSCSATYLRKQYQEVYGVNIVELRETLRGACV

SEQ ID NO: 2854 - protein, 241 aa, Artificial Sequence
  Description of Artificial Sequence: Synthetic polypeptide
MSQLGAIYCRKSSVGKYAIKELSLNVQNDVCKEYCVKNNISVQEDMRIAETVSAREMSKMVELEKLIKKLGENAVLVVSNVSRFSRNVQQAIPVLELLRKNNIFVHSVNDNCRYDNDFNNRHHFRQMLSQAEFESDQISDRANKSIESRRKKGCKIGKSRFGYESFYDKNGLRRERENKAEQLVLELLTVYKERGHSARECAIFLNEKNCTFRKKEWNAVRVNYVLRSVDSGGEKKELGGV

SEQ ID NO: 2855 - protein, 240 aa, Artificial Sequence
  Description of Artificial Sequence: Synthetic polypeptide
MAKKYVTYKRVSTKRQGESGLGLEAQQRDLKLYFDTYAGEDFEVLGEFTDVDSGTNDSRVEYLKALEMVKSEGATLIVAKLDRISRKVSTIACLIEEIDFKVASMPNADKFQLHLYAALSEQERDFISLRTKAALSVKKSQGVLLGGANPKQRASFQANRLNHKSYRNNQKALEKAQPIVSEVTKMVEYSKDGLTQQEITDNLNSKGIKTASGKEWTVANVSKLIKKHGIPYKKKSRWNK

SEQ ID NO: 2856 - protein, 240 aa, Artificial Sequence
  Description of Artificial Sequence: Synthetic polypeptide
MSAVCYFILIKKPISFQFLKDFLILNYGDVLLLKHSEHECLKMYSDKYIEFELNDNTVRNYLLCSNNLGNQSLDKCPHLLKKSFAYPDLLIRMIDNISDQNHIHSDFREAVTFSLLSIFNDVDNFRAFLTSGMPTFSGKVRSIFLSDVSKHWKLRDLTDYLYMSESLIKKKLLLENTSFSKLLLDTRMAFAIKLLKQNHSVKQVSESCGFSSTSYFVCLFRQYYNCTPREYAKHQLLSGK

SEQ ID NO: 2857 - protein, 238 aa, Artificial Sequence
  Description of Artificial Sequence: Synthetic polypeptide
MTIYAYKRCSTNEDKQDTARQLYGKTFDEVVIEYASGKNEKGRPLFKELKDKLLSGDELHFNDLSRAGRNTKELLSTIEDLVDRNVKVVFHTENLTFVSGGQDPMAGAMSKMLLTMLASVNELFLTQTKIAVKQGLERVRQESPEKLSKNRDSQWHKTFTENRAKGLHKYQTTKVSRTNDKQLLLVNRVKSMISDSNGQLTQKQMCEKLTLEGFTNSNGGVISQGSLAKLIKKYNLNS

SEQ ID NO: 2858 - protein, 237 aa, Artificial Sequence
  Description of Artificial Sequence: Synthetic polypeptide
MDNKKYVAYYRASTESQRDGIGLEVQKSSVEAFVKSYGGTIVEEVSEIISGGAQVREGFDKALELCKKHSAVLLVHRIDRLSRAGFMTIAKLEEKGVPFIEADSPHDSEFSKNIKFLIAKEEKDKTQRRVKDALGQIKANIESDGYHITKAGDRITSLGNPQNLSDMARERSKVIRKAKAIANENNRRAYAMASRMKSNKSTLKQIADYLNKNGFETSKGNKFYPIQVSNLIKLYEN

SEQ ID NO: 2859 - protein, 237 aa, Artificial Sequence
  Description of Artificial Sequence: Synthetic polypeptide
MQSEEGISLDTQLKKIQDYCSYKGFELFNKIYKDEGLSGKNMERPELKKLLDDVQKDDYVIIYELSRLSRNTRDALNILEQINNKGGFLICLNPDIDFSSPAGKMMYTVLSAFHQLERETTSQRVSMNMKNLSKQNLLRSRPPFGYKFISKDKPMIEDEEQQKVVKVIKEKYEELKNITAVTEYLNSNGYNKCFKKEGQKFYVQTVKNILSDYGVINTNRKKISDKFLDTRKNAIKQ

SEQ ID NO: 2860 - protein, 235 aa, Artificial Sequence
  Description of Artificial Sequence: Synthetic polypeptide
MKAEFRDKLFKDTLKWIDNNFHRSIRAKDIGDQLGMSMNNVTDLFRRQLDTTPGEYLRVVRMKHAKQLLMKGVRPTSVYKQTGYSSYRAFTRVYQIHFGVQPSQDYHYFMGVITEPMATPQMDTLYPFALRKRIVDYVKDNIQCNYTLRDLESRFKLPGSCLGEMFVHYYDQTYTDWRKSLRMRMASDLIRDNPKIDVTRIHGQLGICSFQYFVTLFKQHYRTHPQSYANAFKRK

SEQ ID NO: 2861 - protein, 235 aa, Artificial Sequence
  Description of Artificial Sequence: Synthetic polypeptide
MQQSFREQLFQDTLKWVDKNFHRTIRAKDIGDQLGMSMNGVTDLFRRQLDTTPGAYLRGVRMRHAKQLLMNGVKPTSVYKECGYSSHRAFTRVYQESFSTTPTEEYTFYAGVITEPISVPQMDVLYPESLRESIKKFVTENIQCNYTLRDLESRFKLPGSCLGEMFEHYYGMTYTDWRKSLRMKIASDLIRENPKIDVTSIHGQIGICSFQYFVTLFKQQFRTHPQTYANSFKSK

SEQ ID NO: 2862 - protein, 235 aa, Artificial Sequence
  Description of Artificial Sequence: Synthetic polypeptide
MWKIGAIRLSDSAAEKARQMFILKDYFKKHNITDVQYVEDIGTSGGVPILDRPNLGSVLKKAPKGTTVYVSDISRLGRLDYDMMKFRDDKNFKLVVCNNPEITEDKNRIMFGVNAIMSDQYRRDLSVKQKEKCQEMQASIVDKGYYITKSTNRKMTKLGVHGFMDKARAKASQSRKEKANFYIGQIRIHLEDAQNHSESLLGMANYLNARSVKTSRNSCWSASTVKRALDRLQTL

SEQ ID NO: 2863 - protein, 234 aa, Artificial Sequence
  Description of Artificial Sequence: Synthetic polypeptide
MTDHELALQIQDYVKEIYMKPRPSNLVYTKFNMSGPVMGRFLERLNHPSIKVMLVEARMERAKELLAQDMVNVPGIHTHVGYSTRNSFERRFKDHVGMSPAVYRKKIQEQQTEQEHMTYSKRVNEVTQNELRKYLIKHFREPELTLNRVQDVFNLSKDEIQEIIGIVYNCTFEERLLTMRLEEVGNLLVKTTRTPRQLSTECGFVSYHYFVGQFTKRFTVGPKHYRQLKLIKAI

SEQ ID NO: 2864 - protein, 233 aa, Artificial Sequence
  Description of Artificial Sequence: Synthetic polypeptide
MSQLDTPTARQPVLYGYARVSKQKQNLTTQIRLLNKAGCKQIFYEKISGAKDKKVELGKLISVLQKGDVVVVAHLDRLGRNLVTTLRTIEQINNKGASIKALDFNLDSGTAMGDLMIKFMAFFAELERYFAKMRSEERLANLTKKQRSSLGRKAVLDKKTIKKYYQQYLDRKTTVAAITEKLGITRASFYNALKRYNIKTYVQSHLDGDINDPSFKYGKLHFKRVRGKVQCKY

SEQ ID NO: 2865 - protein, 233 aa, Artificial Sequence
  Description of Artificial Sequence: Synthetic polypeptide
MSRNISYKRVSTTHQSCDRQLAGLGITFDIEFSDKLSGKNTNRPQLQECMSVITEGDVLWVHSIDRLARNVEDLRGIVFDLMDKGATVKFVKEGLEFTGSQDEAMKASMSKMLLTLLGAVAEFERSLITSRVREGVQQAKLKGKKIGGSNPQWKQSYTTNRAAGKHSTTKDFKPSPQKEKLIVDIKTAISYSSPKTFVELADKLNQNGVMTLSNKVWDGKSLAVFAKRNEIKL

SEQ ID NO: 2866 - protein, 233 aa, Artificial Sequence
  Description of Artificial Sequence: Synthetic polypeptide
MKVVLYRRLSKEDKTKNQHGLDSQLADINYYLNTLDSYEIIGDFSEFISGGADKKLELNKAIALCEKEGATLVVAKLDRLSRRVSQIALYMEGSVKFKVALMPSAENLQLHIYAALAEEERASIRDRTKRGCAAAKAKGILSGRASPNYGMNSGNGTKNIDKIIAERKQAALEKSMYVVPEIKKALKYLGKRPTQQKVATFLNDANIPTPSGRGSWKQSTVQRVLERHNINLF

SEQ ID NO: 2867 - protein, 233 aa, Artificial Sequence
  Description of Artificial Sequence: Synthetic polypeptide
MKVVLYRRLSKEDKTKNQHGLDSQLTDINYYLNTLDSYEIIGDFSEFISGGADKKLELNKAIALCEKEGATLVVAKLDRLSRRVSQIALYMEGSVKFKVALMPSAENLQLHIYAALAEEERASIRDRTKRGCAAAKAKGILSGRASPNYGMNSGNGTKNIDKIIAERKQAALEKSMYVVPEIKKALKYLGKRPTQQKVATFLNDANISTPSGRGSWKQSTVQRVLERHNINLF

SEQ ID NO: 2868 - protein, 233 aa, Artificial Sequence
  Description of Artificial Sequence: Synthetic polypeptide
MSDKKSKELKKLKSAAKKYCLEPNASELVLKKTLFSLPKVIKMFRDAGEGSLYDYITHLKMLEAKKLLDDTDLNLTSISRAIGYADRKSLRENFIKQFGMYPLDYRNRPKTNDLAWDLFKSHPKLTVQRQTFLLDHVKKHYKDSDLSIQTLSDRFRLTHQDIDLIINHHYGSGLKQLLLDLRLNQAHAKLPNYYKSVRQLAEELGFLDFNYFVVKFERKYGMGPRRYQQHARL

SEQ ID NO: 2869 - protein, 233 aa, Artificial Sequence
  Description of Artificial Sequence: Synthetic polypeptide
MSDKNSREFKKLKNAAKKYCLEPNASELVLKKTGISPTRVIKLFRDAGEGSLYDYITHLKMLEAKKLLDDTDLNLTSIARAIGYTNHKTLRENFIKQFGTYPLNYRNRPKTSDLAWGLFKSHPKLTVQRQTFLLDHVKKHYKDTGLSIQTLSDRFRLTHQEIELIINHHYGFGLKQFVLDLRLNQAHAKLPNYYKSVRQLAEELGFLDFSYFVVKFEKKYGMGPKRYQQHTRL

SEQ ID NO: 2870 - protein, 233 aa, Artificial Sequence
  Description of Artificial Sequence: Synthetic polypeptide
MFDKKSRELKKLKDAAKKYCLETDATELVLKKTGFSRTKVLKMLRDANEGSLYDYITLLRMLEAKKLIDTTDLEITAISRAVGYTKPKSLRENFVKLFGITPVDYRHRPKTEDHAWKLFKKHPKLTVQRQTYLLDYVKKHYNDPEVSVHVLADRFRLTHQEIELIIKHHTGEDFKTHLLNFRLNQAHGRLPNHLKPIKELALKLGFRDFNYFVVKFENKYGMGPKRFRQLSRL

SEQ ID NO: 2871 - protein, 231 aa, Artificial Sequence
  Description of Artificial Sequence: Synthetic polypeptide
MKVIIYKRLSKEDRTKTQHGFNSQQRDIDFYLSDVEHKVIGTFQEFVSGGEDSKPELKKAMELCRTEGATLVVAKLDRLSRRVSQVAAYMEGDVKFKVAALPQADNFQLHLYAALSEQERTMIRQRVKAGLDAAKAKGVKLGGASDKWQKSYNRSKSKHVSKTNHIKSQESWESKRSQIEGVLKIMGRNKISLTYKNISSNMNDMNIKTATGGKFTPSQALRALSYLNITR

SEQ ID NO: 2872 - protein, 230 aa, Artificial Sequence
  Description of Artificial Sequence: Synthetic polypeptide
MVALNDESKNGYIYCRQSKKLKKSNSLLNQHKICKKYCEKNKIKVKKTKKEHKSGRFFKNKASLMELRNKMVSGDTLVVYRISRLSRNYEKGWNFIKTLKENNIKVVSVDENINSFDNINEFQEKLKSSEDYSNELSDRINKINRCLRHKGWHFGYVPYGYERYFTLNNVRKMRPNNTEQYVIKLINRLRKNKKSYKEISKFLNKKRLLFRKKYWDSIMVGTVYRKHNKK

SEQ ID NO: 2873 - protein, 229 aa, Artificial Sequence
  Description of Artificial Sequence: Synthetic polypeptide
MTAALIYCRISTDRQTTLLAQEDACRAYCGRRGLVVRKVVSEIVTAYSGRHLAEQRIEVPRGVRHVICYDVSRMGRLSDDAAFVREHLARGVQFHFVSENIVSRAADDAGFREVQQRLRLAQHESEQLSNRIRNGKMVKDSKIRSLLALIHGGANDNLIRNFVLRNFNRVVVDSLVGLPEFELCARLNRYRLYCSRRWTPASLRRFCERPAAGAGATELLSASLSELKF

SEQ ID NO: 2874 - protein, 229 aa, Artificial Sequence
  Description of Artificial Sequence: Synthetic polypeptide
MNNIYHSNDTDIVLAADALVKLARGTINHTNIQPTTTIQPTTTIQPTTTIQPTTAPFILYRAIRLGFDNASTPNTSNANIFNNTKNITPEQNYPTLQSYPMMQNYPTLQSYPVMQNYPVMQSYPMLPTPLSASEQAKSFMEKMTSITKDPRKKNEAPNSRRTLEAPKKKLTKINKKKLLILLSEYDINKYPSRATKKILAERTGLTEKQVYNWLQNKRASDKKQSMMNS

SEQ ID NO: 2875 - protein, 229 aa, Artificial Sequence
  Description of Artificial Sequence: Synthetic polypeptide
MTAALIYCRISTDRQTTLLAQEDACRAYCGRRGLVVRKVVSEIVTAYSGRHLAEQRIEVPRGVRHVICYDVSRMGRLSDDAAFVREHLARGVQFHFVSENIVSRAADDAGFREVQRRLRLAQHESEQLSNRIRNGKMVKDSKIRSLLALIRGGANDNLVRNYVLRNFNRVVVDSLVGLPEFELCARLNRYRLYCSRRWTPASLRRFCERPAAGAGATELLSASLSELKF

SEQ ID NO: 2876 - protein, 228 aa, Artificial Sequence
  Description of Artificial Sequence: Synthetic polypeptide
MSSKNVKETAKFVAPGRARKILGISDATLRRWAETKKIESFITPSGRRLYNVENLFGVVRPPTDDAIIPRGSKSFLYARVSSSKQRDDLQRQIDFLKEKHPDFEVVSDIASGINWQRKGLRKLLDLSSAGGVERIVVAERDRLCRFAFELVEYVFSINGTIVEVVGSEESSPEQELQEDLLSIVQVFCCRRNGKRRYKGKKKDENPEESCDRNSNHKDSSDKITETTD

SEQ ID NO: 2877 - protein, 228 aa, Artificial Sequence
  Description of Artificial Sequence: Synthetic polypeptide
MRNIGYLRVSTDNGSQKTDRQLHDVGVDFHKIFEDKASGSSINNRPQFVEMLDYLQENDTVHIQSNDRCFRNVKEMLGFVEDMLERKINIRLHTENLHFVHDGNEMMLAQSKLMLTQLAAFSEFFLTQNRVAIKQGIKAAKNRGVLFGAANPKYRESFEKSKAAGLHKTPVRKVAQPELLARIRQMVGDSNNSLTQMEMTSKLNAEGWTSARGKVLSQGMISKLLKEI

SEQ ID NO: 2878 - protein, 228 aa, Artificial Sequence
  Description of Artificial Sequence: Synthetic polypeptide
MKKKNNKNADNEVNKKKEVGKKLMGGKEASRILGVHQRTLYQWEEKGKIDTIRTPGGKRLYNVEKYLREQGLTIEENNDVYDTDLDALDKKKGKLRISYARVSSRGQKDDLERQKRLIKEKYPDHILIEDMGSGMNFNKRGLRKIIKLAIEGRVEELVVAYKDRLTRVGYELIEDLIKEYSGGRITIIEKKDELEPEESLVYDVLQIMNIFVAKMNGLRKYRKKEEKK

SEQ ID NO: 2879 - protein, 227 aa, Artificial Sequence
  Description of Artificial Sequence: Synthetic polypeptide
MKAYIYCRLSGRRGSVNSQTEECIKYCKSKGWEVAETFEQITSSRNMKNKNLLETIVDKMSNGDILVVYSVDRFSRNMLGGLQILEKMERKGVTIYSVFENLTYSTTSEKFNFRNLLNFAEFETDQISSRTKRGKKRKIDQTVDQTTNPIAVKTPKKTKANDKPKETKPNNKIVENASVNDNDNDFPYKTVDTISDETKEIKTQVSKKKKLETKFMQKQLNNYFKTK

SEQ ID NO: 2880 - protein, 226 aa, Artificial Sequence
  Description of Artificial Sequence: Synthetic polypeptide
MCLTIIHLHISIWTLSSSWDSKGLIPTTRTPTGISLYDVEFIAPTVKFTRGKAKNSGRRVIYARVSSTKQKADLERQIQLLSEKFPGHKVIRDIGSGINWSRPGLKTLLRYCLDGSIREVVVAHRDRLSRLGFELLKFLIEEAGGKLVVLSESQTEQGVDEFRPESELGEDLLSIVHIFSCRHYGRRKYGKGRRKSTETQETNQEGSKDEGQGGGSEMQEGKDTSE

SEQ ID NO: 2881 - protein, 226 aa, Artificial Sequence
  Description of Artificial Sequence: Synthetic polypeptide
MRHIGYLRVSTISQVTDRQLHDVGVDFHKTFEDKASGSSINNRPQFVEMLDYLQENDTVHIQSNDRCFRNVKEMLGFVEDMLERKINIRLHTENLHFVHDGNEMMLAQSKLMLTQLAAFSEFFLTQNRVAIKQGIKAAKAKGTLFGSANPKYKETHQRNKAAGLHKTPVRKVAQPELLARIRQMVSDSNNTLTQMEMTVKLNAEGWTSARGKALSQGMISKLLKEL

SEQ ID NO: 2882 - protein, 226 aa, Artificial Sequence
  Description of Artificial Sequence: Synthetic polypeptide
MRHIGYLRVSTQDQSVSRQLHDVGVDFHKTFEDKASGASINNRPQFVEMLDYLQENDTVHIQSNDRCFRNVKEMLGFVEDMLERKINIRLHTENLHFVHDGNPMMLAQSKLMLTQLAAFSEFFLSKSREDCRQGIKAAKAKGTLFGAANPKYRESFEKSKAAGLHKTPVRKVAQPELLARIRQMVNDSNGSLTQMEMTAKLNAEGWTSARGKVLSQGMISKLLKEL

SEQ ID NO: 2883 - protein, 226 aa, Artificial Sequence
  Description of Artificial Sequence: Synthetic polypeptide
MRHIGYLRVSTISQQVDRQLHDVGVDFHKIFEDKASGASINNRPQFVEMLDYLQENDTVHIQSNDRCFRNVKEMLGFVEDMLERKINIRLHTENLHFVHDGNEMMLAQSKLMLTQLAAFSEFFLTQNRVAIKQGIKAAKAKGTLFGSANPKYRKSFEKNKAAGLHKTPVRKVAQPELLARIRQMVNDSNGNLTQMEMTAKLNAEGWTSARGKVLSQGMISKLLKEI

SEQ ID NO: 2884 - protein, 225 aa, Artificial Sequence
  Description of Artificial Sequence: Synthetic polypeptide
MRDPLDKGTLDIVTGGMRIGYARVSTVDQNLELQHDALARAGCVQVYEEKASGKSKDGRPELANMMRALRKGDTLIVWRLDRLGRSLVDLVQLVDELAGRGVAFESLSEKIDTSTAQGRMFFGFIAAMAQYQRDVISENTLAGLKAARARGRNGGRPAALDDAAIKEIRVLMKSPDISMASIAKRYGVSKPTLYNSLKRAEKKGAEKPSRKRTSANSSRSRSNTR

SEQ ID NO: 2885 - protein, 224 aa, Artificial Sequence
  Description of Artificial Sequence: Synthetic polypeptide
MDLQKACDRISQEFETDIIMGANLLVQMIQSQRITSNTPVQTVQPVQPVQPVQSVQSVQSVQSVQSVQPVQPVQPVQPVQPVRVPEINPVLFSYLIPLIPFIQMYHIAQKDVVPKNPQVQKQDVSQFTPDGKFKIPINKTKTIKKSTSEKKTSPKKKTTSQQIKRVRLSDEERNILESQYSKNNFPSPEIRDELAKKIGKTPRQVQIWFQNKRCKDRKNLEKNN

SEQ ID NO: 2886 - protein, 223 aa, Artificial Sequence
  Description of Artificial Sequence: Synthetic polypeptide
MKKFVVYSRLSKQKKGEAQYGMESQENDIRYFLDSVPDAEVIGQFSEYYSGKGDWKQRKELVKAVEMCKATGATLLVAKVDRLGRNNASVATLLEMIDVKIAIMPDADKMVIQLLSVLAEQEVRGIADRIKKGLAVAKSKGVLLGSANPKTAAARRKGKMEYNSVKADAFAETFRERLEILRDLNTPYKTIAEKFNSKKIATARGGKWDAKTVSRLCARLNIK

SEQ ID NO: 2887 - protein, 223 aa, Artificial Sequence
  Description of Artificial Sequence: Synthetic polypeptide
MLCRGCSKEIEPDYRYGNTHLKKCRNCAKLDYHARYKRVKEKAFIEIKGTTPAEVKRLSNESDYVLSSKGDIWKLTNNGYRKLKGKVNKTGYHVIYISPSDPAIPFAGKNGGEYYVHRVVATLFIANPNNLPVVNHLDGNPINNDFSNLEWCTQKRNAQHACDTGLSPIGDKLPQSKLTAEKVKVIKDRLHKGEPITSIAEDYGVHRETVGAIKRGISWKHVK

SEQ ID NO: 2888 - protein, 222 aa, Artificial Sequence
  Description of Artificial Sequence: Synthetic polypeptide
MNKRYVGYTRVSTDKQGKEGYGSADQLQTINEFVKNDELLQVFQEEESGSRNDRPQLTQALELCKKEKATLVIARLDRLSRNLAFTASLMESKIEFVCCDMPSVNKFTIQVLAAVAEQYLDTLRKNTKSALAQAKKRGVVLGNTKNLKQAARKGNVKKKLLADEKARSVNNIILDLKKYGVTTLSEIAKALNARGIPTVRNGEWYPSTVRNYVNRCSSNVHL

SEQ ID NO: 2889 - protein, 221 aa, Artificial Sequence
  Description of Artificial Sequence: Synthetic polypeptide
MKRYVGYTRVSTDKQGKEGYGSADQLQTINEFVKDGELINVYQEQESGSKNDRPELNKALADCKKHNAILVIPRLDRLSRNLAFTASLMESKLEFVCCDMPSVNKFTIQVLAAVAEQYLDTLRKNTKSALAQAKKRGVVLGNTKNLKQAARKGNAKKKLLADEKARSVNNIILDLKKYGVTTLSEIAKALNARGIPTVRNGEWYPSTVRNYVNRCSVNVHL

SEQ ID NO: 2890 - protein, 220 aa, Artificial Sequence
  Description of Artificial Sequence: Synthetic polypeptide
MKFVLYHRLSKKKQQGNQYGIESQEADIQRFLDSQENYTIVGSFAEFYSGKGDWKQRRELVKAVNLCKETGATLVVAKVDRLGRNTASVATLLEMINVRIATMPSAENMIINILAVLAEEEARAISDRVKKSLKVAKAKGTLLGAANPKYKRTDYTKTEEAKRSKEFALSLKDSLVAYRACKTPYMTIAKHLNESGKRTIRGSLFDAKAVQRLCAKLNIK

SEQ ID NO: 2891 - protein, 220 aa, Artificial Sequence
  Description of Artificial Sequence: Synthetic polypeptide
MKFVLYHRLSKKKQQGNQYGIESQEADIQRFLDSQENYTIIGSFAEFYSGKGDWKQRRELVKAVNLCKETGATLVVAKVDRLGRNTASVATLLEMINVRIATMPSAENMIINILAVLAEEEARAISDRVKKSLKVAKAKGTLLGAANPKYKRTDYTKTEEAKRSKEFALSLKDSLVAYRACKTPYMTIAKHLNESGKRTIRGSLFDAKAVQRLCAKLNIK

SEQ ID NO: 2892 - protein, 219 aa, Artificial Sequence
  Description of Artificial Sequence: Synthetic polypeptide
MNTYKPKDFAEMIGVSVKTLQRWDNEGKLKAYRNPSNRRYYTHNQYVEYMGKIVQDKDKRKTIIYARVSSNSQKDDLKNQVEFLKQYANAKGMIVDEIFEDVGSGLNYNRKKWNKLLEDCMLGAIKTIIVSHKDRFIRFGFDWFERFVKSNGVELIVVNNESLSPQEEMIQDLISIIHVFSCRIYGLRKYKKKIKEDDEIVKSLQSGDKTNSRTKYKNS

SEQ ID NO: 2893 - protein, 217 aa, Artificial Sequence
  Description of Artificial Sequence: Synthetic polypeptide
MIYGYIRVSSDKQTVENQRFEISNFCKINELTIDDWIEETISGTKNYTKRQLGRLLRKVRKDDIIICSELSRLGRNLFMIMEILNICMTKGCKVWTIKDNYRLGEDIQSKVLAFAFGLSAEIERNLISQRTKEALARKKAEGAMLGHRRGFRCRLNPKCANKHDYIVKELDKGTEKTFIAKNLKVSKGTLYRYLVYTGIYFPANCQQEGWKNHGIYH

SEQ ID NO: 2894 - protein, 217 aa, Artificial Sequence
  Description of Artificial Sequence: Synthetic polypeptide
MNKRMLSIGQASKLLGVTIQTLRNWDKKDLLKPDELTKGGERRYKLESLRRINRSTVFNQDELKTIAYARVSSHDQQDDLIRQVQVLELYCARCGFNYEVIQDLGSGMNYYKKGLTKLLNLILDNQVKRLVLTHKDRLLRFGAELVFSICEAKEVEVVIINKGDENVRFEEELAKDVLEIITVFSARLYGSRSKKNKKLLDEMQEVITNNVSYLNHA

SEQ ID NO: 2895 - protein, 217 aa, Artificial Sequence
  Description of Artificial Sequence: Synthetic polypeptide
MNKRMLSIGQASKLLGVTIQTLRNWDKKDLLKPDELTKGGERRYKLESLRRINRSVVFNQDELKTIAYARVSSHDQQDDLIRQVQVLELYCAKCGFNYEVIQDLGSGMNYYKKGLTKLLNLILDNQVKRLVLTHKDRLLRFGAELVFSICEAKEVEVVIINKGDENVRFEEELAKDVLEIITVFSARLYGSRSKKNKKLLDEMQEVITNNVSYLNHA

SEQ ID NO: 2896 - protein, 215 aa, Artificial Sequence
  Description of Artificial Sequence: Synthetic polypeptide
MNKIVALVRVSTDKQDVNNQKFAIEKKYPGYDIAWFEEPGISGAKLLRNRPVFQDAVKTAKKLGVPLVAYSMSRLGRTYEVGQFLEDNKGKIKLDILDTPILDDAIAGFHVAINRMERINISNRTKAALARLKAEGVNLGNLTNLAEVRVRGHATIKANADKYAKDIKDIIEGIKLSGVKTFQGIADALNNRGVKTYKDRSWYPTTVKNVLERGC

SEQ ID NO: 2897 - protein, 215 aa, Artificial Sequence
  Description of Artificial Sequence: Synthetic polypeptide
MITYTCDSCTAPITGPVRLSANDGTEKHFCSPICLSVWWNGQGHGEPRKPIEPRRPQPPALATLPPPQPRTRRARPLTPEQDTEILRRYNDGEPVPALAAEFDVAQPTIYKALTRARSAAPQARDALAEVVGLTRQVVDRVVDAAEAAAPVEAPAPAPVAKPQTQQRKPTAPVTARCRDCPRTWNLTGRVLKMTIDLHEHQRGHVVDIEEGALDA

SEQ ID NO: 2898 - protein, 214 aa, Artificial Sequence
  Description of Artificial Sequence: Synthetic polypeptide
MDGYISGSKVKELLNVSDWTLRHWADTGKIKSIRTPGGQRRYDISTFRASKRDHEVEDNRKIICYARVSSRGQKDDLQRQIGFLERHCPEGIVITDIASGINWKRKGLASILELSVQGDIREVVVAARDRLCRFAFELLERMLALHDVRITVLDSEGCSPEQELSDDLLGIVQIFCCRRNGKRRYIRRPDPFFSTPQNAEDKDEPHENPETDAE

SEQ ID NO: 2899 - protein, 213 aa, Artificial Sequence
  Description of Artificial Sequence: Synthetic polypeptide
MNIIKSFNNTIDYLETVLDDEIDEKKVAQLSGYSYSMFSRLFSILTETTLSEYLRSRRLTEAAVILRDTDEKIIDVAFKFGYESSDSFGTAFKNFHGFTPSEVRNGKPFKLVSRVQLSLSVRGGRSMNITIQKKKAFTVAGINENSINSSLCSGIWGKLFSKVSHEEISKFGTGESVGVCHDILNLDNHDVLESNTISYMAGYIVNDGIKQEA

SEQ ID NO: 2900 - protein, 212 aa, Artificial Sequence
  Description of Artificial Sequence: Synthetic polypeptide
MENHEVMISIGDTAKELGVSVKTIRRWANAGKLRFERSPSGHRRFFLADIKRITPRDFNKLEDRVTINYARVSSHDQKDDLTRQIQVLEAFSGTNGWQFETIQDLGSGLNYNKKGLQKLLKRIMKGDVGRLVVTHKDRLLRFGSELVFAMCEEYETEVVIINKSAEEITFEQELVTDMIELITVFSARLYGSRSRKNKKLLDNVAKAVQESS

SEQ ID NO: 2901 - protein, 209 aa, Artificial Sequence
  Description of Artificial Sequence: Synthetic polypeptide
MYSIGEFSRIIGVTRTTLRNWDKTNKLKPILLESGHRRYTDEHLSKIKHIDSDDKLNIVYCRESTKSQKKSLDLQIENIKQFCLKQGISIDKCISEFGSGLNFKRRGFLEILNLAINGKIDRLIIYYKDRLCRFGFEMFEELSKKYNFKIIVVDNTETKSRDKEFADDIIAIIHFFSMRLYESRTYKKNLKDAEESIQKSKRRNINRYK

SEQ ID NO: 2902 - protein, 209 aa, Artificial Sequence
  Description of Artificial Sequence: Synthetic polypeptide
MSISTNFPGIITSLSKALPGVKEPPLNRRTLYGYARVSSRVQHLKVQKDCLMSMGVKEKNIFTDKESGYKEDRKGLKSLCKKMGSGSILFIHATDRLFRHVGHYVKLIYDFNNRGIRIFTYSGQELSFYNEATLITGIQITLAQHERTVISLRTNAPTLERKSGRRKRLYSDKVLRLILEKRNNGQSIRSISRDVDIPSSTLHDLLKNL

SEQ ID NO: 2903 - protein, 207 aa, Artificial Sequence
  Description of Artificial Sequence: Synthetic polypeptide
MINLNFLGGKQTAKLLGVHQRTLYLWESKNKIETIRSPGGKRFYNVQKYLFDKGLSLDENNCIKKIEEIKTKENTRLKICYARVSSRSQKDDLERQKKLLREMYPSYELIEDVGSGINLIKRGLLKIIDHIIKGQIEELVIVHRDRLVRYGYDLLDYMIKKYSKGKITIINNKNEEISSEKKMVEDVLQIMNVFVAKMNGQRKYKKK

SEQ ID NO: 2904 - protein, 207 aa, Artificial Sequence
  Description of Artificial Sequence: Synthetic polypeptide
MLCYSSYMSKLSISEAAKLKGVSVSTLRRWETEGKLIPERTASGHRRYDLAQLLGIKPDLSYTIGYCRVSSHDQKEDLERQKQVVELFCAQNGWQFEIIEDLGSGLNYSKKGLKRLIRLIVDSKLERLVLTHKDRLLRFGSELIFSLCEHFGTEIVIINRTEDSTFEEDLAQDVLEIITVFSARLYGTRSHKNKKIIEELKEVAVRL

SEQ ID NO: 2905 - protein, 207 aa, Artificial Sequence
  Description of Artificial Sequence: Synthetic polypeptide
MLCYSSYMSKLSISEAAKLKGVSVSTLRRWETEGKLIPERTASGHRRYDLAQLLGIKPDLSYTIGYCRVSSHDQKEDLERQKQVVELFCAQNGWQFEIIEDLGSGLNYSKKGLKRLIRLIVDSKLERLVLTHKDRLLRFNSELIFSLCEHFGTEIVIINRTEDSTFEEDLAQDVLEIITVFSARLYGSRSHKNKKIIEELKEVAVRL

SEQ ID NO: 2906 - protein, 207 aa, Artificial Sequence
  Description of Artificial Sequence: Synthetic polypeptide
MLCYSSYMSKLSISEAAKLKGVSVSTLRRWETEGKLIPERTASGHRRYDLAQLLGIKPDLSYTIGYCRVSSHDQKEDLERQKQVVELFCAQNGWQFEIIEDLGSGLNYSKKGLKRLIRLIVDSKLERLVLTHKDRLLRFGSELIFSLCEHFGTEIVIINRTEDSTFEEDLAQDVLERITVFSARLYGTRSHKNKKIIEELKEVADRL

SEQ ID NO: 2907 - protein, 206 aa, Artificial Sequence
  Description of Artificial Sequence: Synthetic polypeptide
MLIMKVLGYCRCSTNEEKQDIDRQIRDIKQLAKAHGHELSNKNIFTEYESGAKIDRIELNRMLDSLGEGDIIISTEVSRISRSTKQLINILELVKEKKNKLILGWFVVDCTKGSLDAMTEGMLKMMGVFAEMERAMTSDRVKSGMANAKAKGKNIGRPKTSIDSIPNIFLKHYSKYKNKEINISEFSRLCNMSRTTIYKYIKLLED

SEQ ID NO: 2908 - protein, 205 aa, Artificial Sequence
  Description of Artificial Sequence: Synthetic polypeptide
MDEYLGGKEASKILGVHQRTLMNWDRKGLIETKRTPGNKRLYNIKKFIGKNNYKLKCKSEECDIKVEEISQKINISYVRVSTYGQKDDLERQKIYMENKYPKNKIISDIGSGINFNRKGLLKIIELAVAGKINKIYIAHKDRLARFGYELIDFIVKKYSKGEIIIINKEEEIEPEEEMVKDILQIMNVFTAKMNGLRKYKKSKYL

SEQ ID NO: 2909 - protein, 202 aa, Artificial Sequence
  Description of Artificial Sequence: Synthetic polypeptide
MSKLTISEAAKLKGVSVSTLRRWESEGKLIPERTVNGHRRYTISQLLGVKENLSYTVGYCRVSSHDQKKDLERQKEVVELFCAQNGWQVEIIDDLGSGLNYNKKGLKRLIRLIVDSKVERLVLTHKDRLLRFGSELIFSLCEQFGTEVVIINRTEDSTFEEDLAQDVLEIITVFSARLYGSRSHKNRKIVEELRDVATRIQD

SEQ ID NO: 2910 - protein, 202 aa, Artificial Sequence
  Description of Artificial Sequence: Synthetic polypeptide
MAILIGGGAVSEGQLLGYARVSTDHQSLDQQTDALTAAGVDVGRVYSDRFTGASTSEQRPGLAALLDYAREGDVIVVVGIDRLGRNAAEVMLTIRDLGQRGIVLRSLREGIDTSNATGRMIAGVLASLAELELELQRERRAAAIAARKARNIPVGRPRVLRPDQVALAKRMRDAGEPVPVIAETLGVSRATLYRTLAEDGSK

SEQ ID NO: 2911 - protein, 200 aa, Artificial Sequence
  Description of Artificial Sequence: Synthetic polypeptide
MNDKLIPRREVLETLKIHYQTLNNMVKRKEIEVVKIGTKYVYNLDKYLRVHGIQKLNKKKLCYCRVSSYKQKEDLDRQIKYMSDKFPTYELIKDIGSSLNFERQGLQKILDYAIKGEVEELVIAYKDRLARIGYELIELMITKYSNGKIIILEKSEEETPDEELVKDILSIMNVYVAKINGLRKYKTLIKKEIMDKQPKK

SEQ ID NO: 2912 - protein, 199 aa, Artificial Sequence
  Description of Artificial Sequence: Synthetic polypeptide
MELMSIGKFAKRVGVNVVTLRRMEAKGEFLPAHVSSGGTRYYSTDQLKYFGKKRNAHKLAVGYCRVNTPSQKDDLENQVNNVKSYMIAKGYQFEIIKDIGSGINYKKKGLKELIDKINNQEVSRVVILYKDRLIRFGFELIEYLCQINNVELEIIDHSEKSKEEELTDDLIQIITVFANRLYGQRSKKTKRLIEEVKKQ

SEQ ID NO: 2913 - protein, 199 aa, Artificial Sequence
  Description of Artificial Sequence: Synthetic polypeptide
MLVGYARVSTKSQSLQPQIDALENEGVERIFTDVASGADPEREGLAEAFEFMRSGDTFVVFRLDRFGRSLKDLLKRIEQLEERGVEFRSIADGLRTDSASGKLVFHVVGAIAQFERNLIKQRTREGLDAARAEGRVGGRKKAIQYSDMPILSRLIRADDVTTEQIAERFDVTRKTIYAYVAPDGTWRDEEYIRRREREQ

SEQ ID NO: 2914 - protein, 199 aa, Artificial Sequence
  Description of Artificial Sequence: Synthetic polypeptide
MIRVNDEAFKRATSCDLQYDSAELRYVGMSNPIVSRIATTVAISLVQHPPCALLVDSLATTLSIAVLNEITGRPRKEMSGALCPKRKQRVIEYIEANIGDPITLSELASVAALSPHHFSRSFRRTFGVSPVRYVWTRRIDMAKRLMRYSALPLAAVALTCGFSSQSHFSTAFRVATGVTPAAYMRTITDIARPRDSRAT

SEQ ID NO: 2915 - protein, 199 aa, Artificial Sequence
  Description of Artificial Sequence: Synthetic polypeptide
MKNIGNSYKTRKTACEMLGISYPTLYKLAEKGEIDTIMIGKQQLYNVNTYFTKIKSINPNKKNICYCRVLNKKHKNDLNEQIKSMTSLYPDYEIISDIGSGMDYERAGLMKILDYAIKGEIENVVISNKDKLVKFGYELIENIIKLYSNGKIVVLNTPNETTQPDEISKEITAILNAYPATTGLKKHKQALIDELTNKK

SEQ ID NO: 2916 - protein, 199 aa, Artificial Sequence
  Description of Artificial Sequence: Synthetic polypeptide
MDKYISRKEVLSVLKIHYHTLYRMIDRNEIQTVKVGSKILFNLDKYLRDQGIKTQKRKICYCRVSSSKQKEDLLRQIKYMKTKYPSYEIISDIGSSLNFERKGLQEIIDIAIKGDIDVLVITYKDRLARIGYELIESIIQRYSNGKIEIINSSEEETPEEEMTKDIITIMNVYVAKINGLRKYKKKLTDTIKNGKNNIK

SEQ ID NO: 2917 - protein, 199 aa, Artificial Sequence
  Description of Artificial Sequence: Synthetic polypeptide
MKSKEVLQLLGVSRVTLYKYVKNGTIKVTELDNGTYDYDQKSVFKLMKKDNRKNVLYARVSTYKQKNDLENQVQQLIDYCTKEEIKYDNVYKEISSGIDLNRTEFSKILDDIIHYRIANIYITYKDRLTRLSFTTLETIFQKFGTQIIIINNLDIDKNNDNEVFDELISLIHIFSTSMYSNRRKRKLHIVNKDLELFDE

SEQ ID NO: 2918 - protein, 198 aa, Artificial Sequence
  Description of Artificial Sequence: Synthetic polypeptide
MVKSKGCIFMIFGYCRVSSKVQIDNNSLEQQEQEIKRHYSDAKIFREQHTGSTTHRPIFEEMVKQMRDGDKLVVTKLDRLARNATEGINLIQNLFDSGISVHVLNVGLLENTTLGKFFITTLLAVAEMERNLILERTFAGKEIAKQNPNFREGRPKKYTKMQMEHALELLKTNSYTQVERMTGISKSTLQRAKRKQED

SEQ ID NO: 2919 - protein, 198 aa, Artificial Sequence
  Description of Artificial Sequence: Synthetic polypeptide
MSKYITGKKASEMLKVHQRTLHNWDRKGIIDTIRGPGGRRLYNVKKYLEEYEDDIDIDTEEDEQEDNEKMKIAYVRVSTHGQKDDMQRQIKYMKKHYPNHKIIQDIGSGINFNRKGLRKIIKWAIEGNVKELVVAYKDRLTRFGFELIEDLIKEYSGGTIKIINKEKEIEPEIELAKDVLQIMNVFTAKMNGMRKYKS

SEQ ID NO: 2920 - protein, 197 aa, Artificial Sequence
  Description of Artificial Sequence: Synthetic polypeptide
MLIGYVRVSTNDQNTDLQRNALVCAGCEQIFEDKLSGTRTDRPGLKRALKRLQKGDTLVVWKLDRLGRSMKHLISLVGELRERGINFRSLTDSIDTSSPMGRFFFHVMGALAEMERELIIERTMAGLAAARNKGRIGGRPPKLTKAEWEQAGRLLAQGIPRKQVALIYDVALSTLYKKHPAKRTHIENDDRINQIDR

SEQ ID NO: 2921 - protein, 197 aa, Artificial Sequence
  Description of Artificial Sequence: Synthetic polypeptide
MITYTCDSCTAPITGPVRLSANDGGEKHFCSPICLSVWWNGQGHGEAHKPIEPRRPQPPAQPRTRRARPLTPEQDTEILRRYNDGEPVPALAAEFDVAQPTIYKALTRARSAAPQARDALAEVVGLTRQVVDRVVAAPTPVAKPAPQQRKLTAPVTARCRDCPRTWNLTGRVLKMTIDLHEHQRGHVVDVEEGALDA

SEQ ID NO: 2922 - protein, 197 aa, Artificial Sequence
  Description of Artificial Sequence: Synthetic polypeptide
MLIGYVRVSTNDQNTELQRNALECAGCELIFEDKISGTKSDRPGLKKLLRTLSEGDTLVVWKLDRLGRNMRHLVILVEELRERGVNFRSLTDAIDTSTPMGRFFFHVMGALAEMERELIVERTRAGLEAARAKGRIGGRRPKLSTSEWEQAGRLLAAGESRQRVALIFDIGLSTLYKKFPSSATKNKLCHPLTNRDK

SEQ ID NO: 2923 - protein, 197 aa, Artificial Sequence
  Description of Artificial Sequence: Synthetic polypeptide
MGRFLEKHNHPSVKEMLVEARMGHAKHLLSLDMINPLTIHDEVGYGARASFERRFKDYTGMSPTDYRKSIICKVKDGDRETYPKRINEVTQNELRKYLIRHFREPELTLTRVQDDFNLSKEEVQEIMKIVYDSTFEERLVTMRLEEAAKLLFKPKLTPRQIATECGFVSYHYFVVQFTKRYDVGPKQYRQLKLINAI

SEQ ID NO: 2924 - protein, 196 aa, Artificial Sequence
  Description of Artificial Sequence: Synthetic polypeptide
MLYGYARVSTQEQETHAQTDALAKAGVGFIFAEKRSGGSMSQRPQLEALLQQLSPGDTVVVYKLDRIARSLKDLLTIIERIEEKGAQFRSLTESLDTSTPAGRMIFHIVGAFAEFERELIRERTRVGMAAAAKRGVKLGRHYAMSREDEAEALRMWYSGQWTKTAIARQFNTHISSVKRAIKRHEVSLQTSLLDAA

SEQ ID NO: 2925 - protein, 196 aa, Artificial Sequence
  Description of Artificial Sequence: Synthetic polypeptide
MLYGYARVSTQEQETHAQTDALFRAGVGFIFSEKRSARSTVGRPQLEKLLRTLKPGDQVIVYKLDRIARSLKDLLRIIERIEEKGAQFRSITESLDTTTPAGRMLFHMVGAFAEFERELIRERTIAGMEAAVRRGVKLGRHYAMSREDEAEALRLWHQGTMTKSAIARMYGVHMSSIKRAIKRHQESVQPSLLDAA

SEQ ID NO: 2926 - protein, 196 aa, Artificial Sequence
  Description of Artificial Sequence: Synthetic polypeptide
MLYGYARVSTQEQETHAQTDALSKAGVGFIFSEKKSGGTTAGRPELEKMLRILKHGDQVVVYKLDRIARSLKDLLRIIERIEEKGAQFRSLTESLDTTTPAGRMLFHMVGAFAEFERELIRERTRAGMAAAVQRGVKLGRHYALSPEDEAEALRLWFAGQMTKTAIARQFGTHISSIRRAIKRHQERQQPSLLDAA

SEQ ID NO: 2927 - protein, 196 aa, Artificial Sequence
  Description of Artificial Sequence: Synthetic polypeptide
MKPAEFSNRIGVSEQTLRNWDKSGKLIAKRTKGNHRFYTEDDYNDYMGISNKNQKKSYIYARVSTRNQKDDLEDQIDFLRQYTNAKGIIVDDCLTDIGSGMNYKREKWNELLDMVMQDKVDNIYVSYKDRFVRFGFEWFEQLCKKHQTNLIVVNNEETSPNQEVVDDLIAIIHVFSCRVYGLRKYKKKVGDDFKCK

SEQ ID NO: 2928 - protein, 195 aa, Artificial Sequence
  Description of Artificial Sequence: Synthetic polypeptide
MLIGYVRVSTNDQNTDLQRNALVCAGCEQIFEDKLSGTKTDRPGLKRALKRLQKGDTLVVWKLDRLGRSMKHLISLVGELRERGINFRSLTDSIDTSSPMGRFFFHVMGALAEMERELIVERTLAGLAAARARGRTGGRRPKLTKEQHEQIARLIKNGHDRKQLAIIYGIGTSTIYRYHPAGESSGTIEKSQKTK

SEQ ID NO: 2929 - protein, 195 aa, Artificial Sequence
  Description of Artificial Sequence: Synthetic polypeptide
MIVMAKVGYRRVSSRDQHLDRQLSGVALDKMFDEKCSAKTVNRPVWQDCLNYLREGDELHIHSLDRVCRSGAGDAVKIVESLTAKGITVEFHKEGMRFNNVMTATQKGVLAIIASIAQMERELIAERREEGIIKAKEKGKKFGRPRAEVSVEEIMALRNQGLSMDAIARRLAVGRATLYRIINVTTEDHHGNACF

SEQ ID NO: 2930 - protein, 195 aa, Artificial Sequence
  Description of Artificial Sequence: Synthetic polypeptide
MSKYVSGKKASEILKVHQRTLHNWDRKGIIDTIRGPGGRRLYNVKKYLEEYEDDVDIISDDEENDDKLKIAYVRVSTNEQKDDLQRQIKYMKKHYPNHKIIEDIGSGINFNRKGLRKIIKWAIEGKIKEVVVAYKDRLTRFGFELIEDLIKEYSEGKIKVINKENKEEPEIELAKDVLQIMNVFTAKMNGLRKYK

SEQ ID NO: 2931 - protein, 194 aa, Artificial Sequence
  Description of Artificial Sequence: Synthetic polypeptide
MLRPKEVCQRLGISYATLREYVKKGYIKPVILQSGKWRFKEEDVERLMGIVRKRKVVLYARVSSNTQKDDLINQVKYLEENVKDYDQVITDIGSGLNMKRKGFIKLLKMILNNEVSKVVVAYPDRLVRFGFEILEEVCKAHNCEIVVINKEDKTPEQELIEDLISILVSFSGKLYGMRSHKYEKVKKCVEELKA

SEQ ID NO: 2932 - protein, 194 aa, Artificial Sequence
  Description of Artificial Sequence: Synthetic polypeptide
MLKPKEVCQKLGISYRTLQSYVKKGYIKPVILQSGKWRFKEEDVERLMGVVRKRKVVLYARVSSNTQKDDLINQVKYLEENVKDYDQVITDIGSGLNMKRKGFLKLLRMILNNEVSKVVIAYPDRLVRFGFEIIEEACKAHNCELVVLNKEDKTPEQELIEDLISILVSFSGKLYGMRSHKYEKVKKCVEELKA

SEQ ID NO: 2933 - protein, 193 aa, Artificial Sequence
  Description of Artificial Sequence: Synthetic polypeptide
MLIGYVRVSTNDQNTDLQRNALVCAGCEQIFEDKLSGTRTDRPGLKRALKRLQKGDTLVVWKLDRLGRSMKHLISLVGELRERGINFRSLTDSIDTSSPMGRFFFHVMGALAEMERELIIERTMAGLAAARNKGRIGGRPPKLTKAEWEQAGRLLAQGIPRKQVALIYDVALSTLYKKHPAKRAHIENDDRIN

SEQ ID NO: 2934 - protein, 193 aa, Artificial Sequence
  Description of Artificial Sequence: Synthetic polypeptide
MQYGYARVSTFDQNLELQLEALRSSGCDRIFEDKISGAKSKRPGLDKLIKVLRPGDTVVVWKLDRMGRSLIHLVELLNFFLSNNIEFISVTEGIKISTSIGRFAYTMLSAAAELERENIIERTRAGLAVARANGRIGGRRSKLTPEQWEQAGRLLAQGVPRKQVALIYDVALSTLYKKHPAKRTCIESNAQTN

SEQ ID NO: 2935 - protein, 193 aa, Artificial Sequence
  Description of Artificial Sequence: Synthetic polypeptide
MSDKSKRTFNRWTSSEEELLKKLYKKNITLNDIADFFPNRTNKQVRAKYDYMFKTKKKHVKPSKRWSEEEEQILKDNYDIEWPELMKLLPRRSRTSIKKKLFQLDLHRPTRKITEEIEERIIELAKTHATSDIVKLTNLSNKSVYDVLNKYNVKAVNKNQWIATDVDIEDEIDLSVTFTLNKNGIRGGIIDEN

SEQ ID NO: 2936 - protein, 193 aa, Artificial Sequence
  Description of Artificial Sequence: Synthetic polypeptide
MPHQILTSEKIVQAGVNIIEADKVLTFSTIAHNLGTHSQALYVYFDSQKQLSYAIVGWAVTQVIESLKTKVFGHSGKQAIIIFATELRSIALKHIQLSRFVLTVQRDDQNPEVQTAFENLRDLLHRLINSIFYDSDNRILASRCIRDLIVGDILNVGSGWFADPTISPDDSFQESLNLCLTIIIQNENKNKNK

SEQ ID NO: 2937 - protein, 191 aa, Artificial Sequence
  Description of Artificial Sequence: Synthetic polypeptide
MPKYVRRKEVLEVLKVHYQTLYRMEEKGLIEVKRTNGGHRLYNLEKYLRDNGLDNKEKKGVCYCRVSSKKQIKDLNRQVEYMEKKYPDYMIIKDIGSGINMERKGLLQLIRMAIDGEISEVVVTYKDRLVRFGFELIEWIIKTYSNGQIKIIHKREEETPEEEITRDILQIMNVYVAKINGKRSGKLKAKK

SEQ ID NO: 2938 - protein, 191 aa, Artificial Sequence
  Description of Artificial Sequence: Synthetic polypeptide
MPKYVRRKEVLEVLKVHYQTLYRMEEKGLIEVKRTNGGHRLYNLEKYLRDNGLDNKEKKGICYCRVSSKKQIKDLNRQVEYMEKNYPEYEIIKDIGSGINMERKGLLQLIQMAIDGEISEVVVTYKDRLARFGFELIEWIIKTYSNGQIKIIHKREEETPEEEITRDILQIMNVYVAKINGKKSGKLKAKK

SEQ ID NO: 2939 - protein, 191 aa, Artificial Sequence
  Description of Artificial Sequence: Synthetic polypeptide
MPKYVRRKEVLEVLKVHYQTLYRMEEKGLIEVKRTNGGHRLYNLEKYLRDNGLDNKEKKGICYCRVSSKKQIKDLNRQVEYMEKNYPDYKIIKDIGSGINMERKGLLQLVRMAIDGEISEVVVTYKDRLARFGFELIEWIIKTYSGGQIKIIHKREEETPEEEITRDILQIMNVYVAKINGKISGKLKAKK

SEQ ID NO: 2940 - protein, 191 aa, Artificial Sequence
  Description of Artificial Sequence: Synthetic polypeptide
MRKRWNKEEDKELLSYILKFVEEGNSLREAVKLASEEINRTFESCYARWNNFLRIEYEDRLETAKSSAKENGNVFYEKWTSDDDEMLADIILNEISNGSSTRKAVNASAKKLNRSFTSCYNRWQTVVSKRFEQKFVFKDCENESNNDLENLKERFLLLENNFHNVLEQNEKIIAQNEELFKMLQKEKGTNS

SEQ ID NO: 2941 - protein, 191 aa, Artificial Sequence
  Description of Artificial Sequence: Synthetic polypeptide
MPKYVRRKEVLEVLKVHYQTLYRMEEKGLIEVKRTNGGHRLYNLEKYLRDNGLDNKEKKGICYCRVSSKKQIKDLNRQVEYMEKNYPEYEIIKDIGSGINMERKGLLQLIRMAIDGEISEVVVTYKDRLARFGFELIEWIIKTYSNGQIKIIHKREEETPEEEITRDILQIMNVYVAKINGKRSGKLKAKK

SEQ ID NO: 2942 - protein, 191 aa, Artificial Sequence
  Description of Artificial Sequence: Synthetic polypeptide
MPKYVRRKEVLEVLKVHYQTLYRMEEKGLIEVKRTNGGHRLYNLEKYLRDNGLHNKEKKGICYCRVSSKKQIKDLNRQVEYMEKNYPEYEIIKDIGSGINMERKGLLQLIRMAIDGEISEVIVTYKDRLARFGFELIEWIIKTYSNGQIKIIHKREEETPEEEITRDILQIMNVYVAKINGKISGKLKAKK

SEQ ID NO: 2943 - protein, 190 aa, Artificial Sequence
  Description of Artificial Sequence: Synthetic polypeptide
MSKYMGGKEASSVLGVHQRTLYQWDKKGWIKTIRTKGGKRLYDVGSYLADKDEESKEDHKLSICYVRVSSNSQKDDLERQIKFMKKKYPNHTIIKDISSGINMNRKGLNKIIDLAIEGRIKEVVVAYKDRLAIFGFSLIERLIETYSDGKIVVVRKKENQEPQEELIEDMMDVMNVFTARRNGSRKYSNK

SEQ ID NO: 2944 - protein, 190 aa, Artificial Sequence
  Description of Artificial Sequence: Synthetic polypeptide
MSKYMGGKEASSVLGVHQRTLYQWDKKGWIKTIRTKGGKRLYDVGSYLADKDEESKEDHKLSICYVRVSSNNQKDDLERQIKFMKKKYPNHTIIKDISSGINMNRKGLNKIIDLAIEGRVKEVVVAYKDRLARFGFSLIERLIEKYSDGKIVVVRKKENQEPQEELMEDMMDVMNVFIARRNGLKKYSNK

SEQ ID NO: 2945 - protein, 190 aa, Artificial Sequence
  Description of Artificial Sequence: Synthetic polypeptide
MSKYMGGKEASSVLGVHQRTLYQWDKKGWIKTIRTKGGKRLYDVGSYLADKDEESKEDHKLSICYVRVSSNSQKDDLERQIKFMKKKYPNHTIIKDISSGINMNRKGLNKIIDLAIEGRVKEVVVAYKDRLARFGFSLIERLIEKYSDGKIVVVRKKENQEPQEELMEDMMDVMNVFTARRNGSRKYSNK

SEQ ID NO: 2946 - protein, 189 aa, Artificial Sequence
  Description of Artificial Sequence: Synthetic polypeptide
MIFGYCRVSSKVQIDNNSLEQQEQEIKRHYSDAKIFREQHTGSTTHRPIFEEMVNQMRDGDKLVVTKLDRLARNATEGINLIQNLFDSGISVHVLNVGLLENTTLGKFFITTLLAVAEMERNLILERTFAGKEIAKQNPNFREGRPKKYTKMQMEHALELLKTNSYTQVEKMTGISKSTLQRAKRKQED

SEQ ID NO: 2947 - protein, 188 aa, Artificial Sequence
  Description of Artificial Sequence: Synthetic polypeptide
MTKYVRRKEVLDVLKVHYQTLYRMEEKGLIDVKRTNGGHRLYNLDKYLRVNGLNKKEKINVCYCRISSKKQSSDLDNQIYYMKKKYPNHLIIKDIGSGINMERPGLKKLIKMAIDGELNEVVIAYKDRLARFGYELIEWIINTYSSGEIKIINKKEEETPEEEITKDILQIMNVYVAKINGRRKYKNK

SEQ ID NO: 2948 - protein, 186 aa, Artificial Sequence
  Description of Artificial Sequence: Synthetic polypeptide
MQGHRIGYVRVSSFDQNPERQLEQTQVSKVFTDKASGKDTQRPQLEALLSFVREGDTVVVHSMDRLARNLDDLRRLVQKLTQRGVRIEFLKEGLVFTGEDSPMANLMLSVMGAFAEFERALIRERQREGIALAKQRGAYRGRKKALSDEQAATLRQRATAGEPKAQLAREFNISRETLYQYLRTDD

SEQ ID NO: 2949 - protein, 186 aa, Artificial Sequence
  Description of Artificial Sequence: Synthetic polypeptide
MTGQRIGYIRVSTFDQNPERQLEGVKVDRAFSDKASGKDVKRPQLEALISFARTGDTVVVHSMDRLARNLDDLRRIVQTLTQRGVHIEFVKEHLSFTGEDSPMANLMLSVMGAFAEFERALIRERQREGIALAKQRGAYRGRKKSLSSERIAELRQRVEAGEQKTKLAREFGISRETLYQYLRTDQ

SEQ ID NO: 2950 - protein, 186 aa, Artificial Sequence
  Description of Artificial Sequence: Synthetic polypeptide
MLIGYVRVSTNEQNTALQRNALESAGCELIFEDKASGKKAERPGLKKVLRMLSRGDTLVVWKLDRLGRSMRHLVVLVEELRDRGINFRSLTDSIDTSTPMGRFFFHVMGALAEMERELIVERTRAGLDAARAEGRIGGRRPKYQEETWQQMRRLLEKGIPRKQVAIIYDVAVSTLYKKFPASSFQS

SEQ ID NO: 2951 - protein, 186 aa, Artificial Sequence
  Description of Artificial Sequence: Synthetic polypeptide
MLIGYVRVSTNEQNTALQRNALESAGCELIFEDKASGKQTERPGLKKVLRMLSRGDTLVVWKLDRLGRSMRHLVVLVEELRDRGINFRSLTDSIDTSTPMGRFFFHVMGALAEMERELIVERTRAGLDAARAEGRIGGRRPKYQEETWQQMRRLLENGIPRKQVAIIYDVAVSTLYKKFPASSFQS

SEQ ID NO: 2952 - protein, 186 aa, Artificial Sequence
  Description of Artificial Sequence: Synthetic polypeptide
MNIAYVRVSTVEQNEERQLEGLKKYNIEKWFTEKISAKDTNRPQLKAMLEFAREGDTIFVWDFSRLARSTKDLLELVETMEAKGVHFKSIKENLDTSTPTGKLMLTMIGAINEFERNNMLERQREGIAIAKAKGKYKGRKEVNIENFEEHYNRYMKREVSKSALAKELNISRPTLDKLIKEHEEKE

SEQ ID NO: 2953 - protein, 186 aa, Artificial Sequence
  Description of Artificial Sequence: Synthetic polypeptide
MGISYRRAWQMYKDGKLPNARQLPTGTIVVIEENEKTIPAPNAVAIYARVSSHENKNNLESQAKRLEDYAIAKGYQIKHVVKEIGSGVNDTRPKLIKLLKQNDYSILLVEHKDRLTRFGFNYLRLLCELQGKQIEVVNSSEEEKEDIVQDFVSVIYSFSAKLYGLRRAKRKTEKIIKEITEEKEDE

SEQ ID NO: 2954 - protein, 186 aa, Artificial Sequence
  Description of Artificial Sequence: Synthetic polypeptide
MFATLRDAKKHYQCNHKTIWKWADEGIIRTVDTPGGQRRYELTERSKPEKTNYCYCRVSSAKQYDDLERQVESMRTEFPGYRIITDIGSGINWKRKGLKTILESAMHGTCGRVVVAHRDRIARFGFELVEWILRANGADLVVQHKDVDASPATELAEDIIAITTVFACKHYGKRRYAKKSDDIPKS

SEQ ID NO: 2955 - protein, 186 aa, Artificial Sequence
  Description of Artificial Sequence: Synthetic polypeptide
MLIGYIRVSTNDQNTALQRNALESAGCELIFEDKASGKKAERPGLKKVLRILSRGDTLVVWKLDRLGRSMRHLVVLVEELRDRGINFRSLTDSIDTSTPMGRFFFHVMGALAEMERELIIERTRAGLDAARAEGRIGGRRPKYQEETWQQMRRLLEKGIPRKQVAIIYDVAVSTLYKKFPASSFQS

SEQ ID NO: 2956 - protein, 186 aa, Artificial Sequence
  Description of Artificial Sequence: Synthetic polypeptide
MAVIGYIRVSTTDQNSDLQRNALISINCDQIFEDKMSGKTAVRPGLKRALKAVQPGDTLAVWKLDRLGRSVKNLIALISDLHERGAHFRSLTDSIDTSTAMGRFFFHVMSALAEMERELIVERTLAGLAAARAQGRVGGRPAALTQNDREQIGRLLDKGYYRQQLAIIYGVGVSTIYRYFPASKKS

SEQ ID NO: 2957 - protein, 186 aa, Artificial Sequence
  Description of Artificial Sequence: Synthetic polypeptide
MPKYLGGKQTSEILGVHQRTLYQWEKKGWIKTVRTNGGKRLYDIEPYLKQKEAEKEKLNICYVRVSSNGQKNDLERQIKYMKKKYPQHIIIKDIASGINLNRKGLNKIIDLAIEGKINELVVAYKDRLTRFGFKMIERIIEKYSNGKIKIINKHNIKEPKEELIEDVLQVMNVFVAKMNGMRKYKN

SEQ ID NO: 2958 - protein, 185 aa, Artificial Sequence
  Description of Artificial Sequence: Synthetic polypeptide
MRLFGYARVSTSQQSLDLQVRALKDAGVKANRIFTDKASGSSTDREGLDLLRMKVEEGDVILVKKLDRLGRDTADMIQLIKEFDAQGVAVRFIDDGISTDGDMGQMVVTILSAVAQAERRRILERTNEGRQEAKLKGIKFGRRRTVDRNVVLTLHQKGTGATEIAHQLSIARSTVYKILEDERAS

SEQ ID NO: 2959 - protein, 185 aa, Artificial Sequence
  Description of Artificial Sequence: Synthetic polypeptide
MQIGYVRVSTNDQNTDLQRNALNCAGCELIFEDKISGTKSERPGLKKLLRTLSEGDTLVVWKLDRLGRSMRHLVVLVEELRERGINFRSLTDSIDTSTSMGRFFFHIMGALAEMERELIVERTRAGLAAARAQGRVGGRRPKLTPEQWEQAGRLLAAGETRHRVGLLFDVSISTLYKKFPVNQSR

SEQ ID NO: 2960 - protein, 185 aa, Artificial Sequence
  Description of Artificial Sequence: Synthetic polypeptide
MVVGYMRVSTAEQNEDRQLVTMKKHNVEKKYQEKISAKDTKRSQLNAMLDFVREGDTIIVHDFSRLARSTKDLLEIVELLEKKHVKLISDKENLDTSTPTGKLMLTMLGAIYEFERTNMLERQREGIAIAKEQGKYKGRKEVKIENFGSYYDRYKTRELNKTQLAKELGVSRPTLDRLIKSHESN

SEQ ID NO: 2961 - protein, 185 aa, Artificial Sequence
  Description of Artificial Sequence: Synthetic polypeptide
MRSKDVLKILNVTRVTLTTYVKTGKIKVTKLANGYYDYDDKSIYDFIGHNKKINIIYTRVSTNKQKYDLQRQIDYLNKYCSKNNIIVGKTYSEISSGIDLDRNEFSSMLDDIFKYKVDKIIITDKDRLTRLSFITLENIFKQFGTSIVVASSKKNNDNNELFDELISIMHLFSTKEYSRRKNKKI

SEQ ID NO: 2962 - protein, 185 aa, Artificial Sequence
  Description of Artificial Sequence: Synthetic polypeptide
MRSKDVLKILNVTRVTLTTYVKTGKIKVTKLANGYYDYDDKSIYDFIGHNKKINIIYTRVSTNKQKYDLQRQIDYLNKYCLKNNIIVGKTYSEISSGIDLDRNEFSSMLDDIFKYKVDKIIITDKDRLTRLSFITLENIFKQFGTSIVVASSKKNNDNNELFDELISIMHLFSTKEYSRRKNKKI

SEQ ID NO: 2963 - protein, 185 aa, Artificial Sequence
  Description of Artificial Sequence: Synthetic polypeptide
MQIGYVRVSTNDQNTDLQRNALNCAGCELIFEDKISGTKAERPGLKKLLRTLSEGDTLVVWKLDRLGRSMRHLVVLVEELRERGINFRSLTDSIDTSTPMGRFFFHIMGALAEMERELIVERTRAGLAAAREQGRIGGRRPKLTPEQWEQAGRLLAAGETRHRVGLLFDVSISTLYKKFPVNQSR

SEQ ID NO: 2964 - protein, 183 aa, Artificial Sequence
  Description of Artificial Sequence: Synthetic polypeptide
MRHAPEPSACVMVRSPERPKKPSKPWTVEEHQRFLIGLRKFGKGRWKEISTHYVPTRTPTQVASHAQKHHQHKSKDPTKRKRTQSLFDIGLEGFGESPCVTPPEVSEENDPDPVPTLPPKKLPTRPTPTRLFEISPLPALDPYFQQFICVSPALMYHYYMMTRTMCHQTLPARYPLYSNNSDR

SEQ ID NO: 2965 - protein, 183 aa, Artificial Sequence
  Description of Artificial Sequence: Synthetic polypeptide
MLIGYARVSTGDQNLDLQKNALIRAECELVFEDMASGKNARRPGLKRALRRLRPGDVLVVWKLDRLGRSVRDLITLVSELQARGVNFRSLTDSIDTSTPAGRFFFHVMSALAEMERELIVERTRAGLAAAREQGRVGGRRRVMTEEVVERCRRMLENGATRQQIADVIGVNVKTLYKYLPAAV

SEQ ID NO: 2966 - protein, 182 aa, Artificial Sequence
  Description of Artificial Sequence: Synthetic polypeptide
MQIGYVRVSTNDQNTDLQRQALERAGCEQVFEEKMSGTVANRPALKKLLRTLNAGDTLVVWKLDRIGRNVLHALLMFQQLQEKGINFRSITDGVDLKTASGRYNFRNILSAAQYESDLNSERTLAGLAVARAKGRVGGRRPKFTDEQWREMGERMATGESRQSVSKTYGVGLSTLYKKFPAS

SEQ ID NO: 2967 - protein, 182 aa, Artificial Sequence
  Description of Artificial Sequence: Synthetic polypeptide
MIYGYARVSTNHQDTELQLTALKSAGCEKIFEEHASGRKSNRPVLKRLIATMQPGDELVVWKLDRIGRNVLHALLMFQQLQEKGINFRSITDGVDLKTASGRYNFRNILSAAQYESDLNSERTLAGLAVARAKGRVGGRRPKFTDEQWREMGERMAIGESRQSVSKTYGVGLSTLYKKFPAS

SEQ ID NO: 2968 - protein, 182 aa, Artificial Sequence
  Description of Artificial Sequence: Synthetic polypeptide
MIYGYARVSTNHQDTELQLTALKSAGCEKIFEEHASGRKSNRPVLKRLIATMQPGDELVVWKLDRIGRNVLHALLMFQQLQEKGINFRSITDGVDLKTASGRYNFRNILSAAQYESDLNSERTLAGLAVARAKGRVGGRRPKFTDEQWREMGERMATGESRQSVSKTYGVGLSTLYKKFPAS

SEQ ID NO: 2969 - protein, 182 aa, Artificial Sequence
  Description of Artificial Sequence: Synthetic polypeptide
MIFGYARVSTNDQDHQLQLDALNKHGVDEVLTDTMTGSKRDRPGLNRLLDKAREGDTIVIWRFDRLARSTIDLLNLVEELTKKGIHLVSLHEGISTTGATGKLMLTMFGALAEFERNLLIERTMAGIESAKAQGRVGGRPKSLSTEQIAMAKDLVAAGYGKAEVALQMGVSRATLYRNLENA

SEQ ID NO: 2970 - protein, 182 aa, Artificial Sequence
  Description of Artificial Sequence: Synthetic polypeptide
MIFGYARVSTADQNHQLQLDALEKRGVDEVITDTMTGSKKDRPGLNRLLDKAREGDTIVIWRFDRLARSTIDLLNLVDDLTKRGIHLESLHEGLSTSGATGRLMLTMFGALAEFERALMMERVAAGVESAKAKGRTGGRPKSMTPEQIKMARDLVDAGHNKTEVATQMGVSRATLYRNLETV

SEQ ID NO: 2971 - protein, 182 aa, Artificial Sequence
  Description of Artificial Sequence: Synthetic polypeptide
MIFGYARVSTAEQDNAMQMTALNNAGVDEVISDKMSGTKKDRPGLERLLDKAREGDVIVVWRLDRLGRSMSNLLELVALLSERNITLKSLHENIDFSTANGRLQLHLFMMLAEFERSLLQERVMAGLAQAKAEGRVGGRPKSMTDEQLAMAKALVEAGHSKGEIAKQMNISRSTLYRNLETV

SEQ ID NO: 2972 - protein, 182 aa, Artificial Sequence
  Description of Artificial Sequence: Synthetic polypeptide
MIFGYARVSTNDQDHQLQLDALNKHGVDEVLTDTMTGSKRDRPGLNRLLDKAREGDTIVIWRFDRLARSTIDLLNLVEELTKKGIHLVSLHEGISTTGATGKLMLTMFGALAEFERNLLIERTMAGIESAKAQGRVGGRPKSLTTEQIAMAKDLVAAGYGKAEVASQMGVSRATLYRNLEKA

SEQ ID NO: 2973 - protein, 182 aa, Artificial Sequence
  Description of Artificial Sequence: Synthetic polypeptide
MIFGYARVSTADQNHQLQLDALEKRGVDEVITDTMTGSKKDRPGLNRLLDKAREGDTIVIWRFDRLARSTIDLLTLVDDLTKRGIHLESLHEGLSTAGATGRLMLTMFGALAEFERSLMMERVAAGVEAAKAKGRTGGRPKSMTTDQIKMARDLVDAGHNKTEVATQMGVSRATLHRNLETA

SEQ ID NO: 2974 - protein, 182 aa, Artificial Sequence
  Description of Artificial Sequence: Synthetic polypeptide
MIFGYARVSTADQNHQLQLDALEKRGVDEVITDTMTGSKKDRPGLNRLLDKAREGDTIVIWRFDRLARSTIDLLTLVDDLTKRGIHLESLHEGLSTAGATGRLMLTMFGALAEFERSLMMERVAAGVEAAKAKGRTGGRPKSMTPEQIKMARDLVDAGHNKTEVATQMGVSRATLYRNLETV

SEQ ID NO: 2975 - protein, 180 aa, Artificial Sequence
  Description of Artificial Sequence: Synthetic polypeptide
MSYVNSKEAQAFFKVSDQTLRRWADNNQIKTKVTPGGHRRFFIPSDDKEKIIYCRVSSSKQKDDLKRQIKFMQKKYPNHKIMSDVGSGINFKRKNFLSLLQQIFQGNVSEVVVASNDRLVRFNYEFFDWLFKQFGCQLISVNKQTEKSPEQELSEDLISIITVFTAKYHGKRKYNFDKKD

SEQ ID NO: 2976 - protein, 180 aa, Artificial Sequence
  Description of Artificial Sequence: Synthetic polypeptide
MSYVSSKEAQAFFKVSDQTLRRWADNNQIKTKVTPGGHRRFFIPSDDKEKVIYCRVSSSKQKNDLKRQIKFMQKKYPNHKVVSDIGSGVNFKRKNFLSLLQQVFQGDVSEIVVASNDRLVRFNYEFFDWLFKQFGCQLISVNKRTEKSPEQELSEDLISIITVFTAKYHGKRKYNLHKED

SEQ ID NO: 2977 - protein, 179 aa, Artificial Sequence
  Description of Artificial Sequence: Synthetic polypeptide
MAKVEIIKANKELSNRNKKGPIEILRVGAYCRVSTDTEDQISSYKSQVAYYDDLIDNNPNWIKVDIYADEAITGTQVTKRTDFQRLINDCMNHEIDIVITKSISRFARNTLDTLKYVRMLKEKNVAVYFEDEKINTLTMDGELLLVVLSSVAQQEVENISANVKKRIKDENESRGAYRI

SEQ ID NO: 2978 - protein, 177 aa, Artificial Sequence
  Description of Artificial Sequence: Synthetic polypeptide
MSYVSSKEAQAFFKVSDQTLRRWADNNQIKTKVTPGGHRRFFIPSDDKEKVIYCRVSSSKQKDDLKRQIKFMQKKYPNHKVVSDIGSGVNFKRKNFLSLLQQVFQGDVSEIVVASNDRLVRFNYEFFDWLFKQFGCQLISVDKQTEKSPEQELSEDLISIITVFTAKYHGKRKYNLH

SEQ ID NO: 2979 - protein, 177 aa, Artificial Sequence
  Description of Artificial Sequence: Synthetic polypeptide
MEAVEKKRGPWSEEEDLILMKHMHEYTQQGYNQTDASAIISELHLPQRTAAAVASHFSGELRHEYARAMQLHDMLKDAPEPITLGDTSYDAIIHVLKQKAEEEEKFKLNHITLQEHYDLLQKRYDSLQVEYDDLERRHMELSADHNVFVRALQKAQEPVETVTLPIKNQVDNEEWVD

SEQ ID NO: 2980 - protein, 177 aa, Artificial Sequence
  Description of Artificial Sequence: Synthetic polypeptide
MARPITDADRRQVRELHAAGKSRNDIARTLDRSPSTVSKIAAQCEPPLTFDRAEQVEAATRVRTADLAARRAALALDLQTDAEKLRAQLWEATQHGEFAGRDGEWRTADLDRPRFPDQRAIVAAVQTAVGTSLRLAPAEGGDDATQVRSMLGALGEALTQAANDDQALDDDRGADGG

SEQ ID NO: 2981 - protein, 177 aa, Artificial Sequence
  Description of Artificial Sequence: Synthetic polypeptide
MARPITDADRRKVRELHAAGKSRNDIAREISRSPSTVSKIAAAFDPPLSFDRAEQVEAATRVRTADLAARRAALALDLQDDAERLRAQLWEGTTHGEFAGRDGEWHETYLERPRFPDQRAIVAAVQTAVGTSLRLAPAEGGDDAGQVRSMLGALGEALTQAANDDQALDDDGGAGGG

SEQ ID NO: 2982 - protein, 177 aa, Artificial Sequence
  Description of Artificial Sequence: Synthetic polypeptide
MARPITDADRRQVRELHAAGKSRNDIAREISRSPSTVSKIAAAFDPPLSFDRAEQVEAATRVRTADLAARRAALALDLQDDAERLRAQLWEGTTHGEFAGRDGEWHETYLERPRFPDQRAIVAAVQTAVGTSLRLAPAEGGDDAGQVRSMLGALGEALTQAANDDQALDDDGGAGGG

SEQ ID NO: 2983 - protein, 177 aa, Artificial Sequence
  Description of Artificial Sequence: Synthetic polypeptide
MARPITAADRRKVRELHAAGESRNAIARALKRSPSTVSKIAGNLDPPLSFDRAEQVEAATRVRTADLASRRAGLALDLQAAAERLLGQLWEPTTHGEFAGREGEWHETHLPQPRFGDQRAIVASVQTAVGTSLRLAPAEGGENAEQVRSMLGALGEALTQAANDDQAHDDDGGDAGG

SEQ ID NO: 2984 - protein, 172 aa, Artificial Sequence
  Description of Artificial Sequence: Synthetic polypeptide
MVTGLKDYSDCVGYCRVSTQKQFEEGHGLERYIAQLKSWGLNDNQIFWDIESGASDKRKGYNKVLDLIKSGAIKKLIIPCFDRFTRSTLQWEQASLELQKHNVTVMFLDGGSTDLTTPDDLFKMRILAAMSAAVRDKNKFNSSQGHKFRRLNEKAHVACFTHLVQVIYYRKV

SEQ ID NO: 2985 - protein, 172 aa, Artificial Sequence
  Description of Artificial Sequence: Synthetic polypeptide
MAGTVVDPNENKILLQWLEANREHPYPSTRQKEELAIETGLELKQVNYWFTNVRRRLKIRKSVRRSSPVERSNTKSCVPVRHRSFTTKQVKILTNWARKNWNHPFPCPKEKEQMVAETKLTYDQVQLWFTNWRMRVWKKNREKGIAITEEKKSAGLTGVDSLRTRLSDFRQC

SEQ ID NO: 2986 - protein, 171 aa, Artificial Sequence
  Description of Artificial Sequence: Synthetic polypeptide
MADDICGHETASGEPCQNPASDGDSCWLDAHGGSANKSGRPSKLSYDRQEKIATAVEGGKSLTSAARMAGVDRTTVYGWIDRGEADKEEGKDNEFTEFYDRLTRAKGHGEDFYFNLALEMAKEDGDHRFIASLMKQRYPDSWGETETGVEATEITVSSDVVEVTEADLQHD

SEQ ID NO: 2987 - protein, 170 aa, Artificial Sequence
  Description of Artificial Sequence: Synthetic polypeptide
MAARPITDTDREQVKALHAEGMSRNDIARRMKRSPSTVSKLAAEQGLTFERGPEVIAATEARRIDLAARRQALAEQLHQDAEQLRAQLWEPCTIGEFAGREGDWQTADLPRPRFADQRQIMGATATAIQQSLRLQPADGGADAGDVRSMLGSLGEALTGAFADDPGEDGG

SEQ ID NO: 2988 - protein, 170 aa, Artificial Sequence
  Description of Artificial Sequence: Synthetic polypeptide
MAARPITDTDREQVKALHAEGMSRNDIARRMKRSPSTVSKLAAEQGLTFERGPEVVAATEARRIDLAARRQALAEQLHQDAEQLRAQLWEPCTIGEFAGREGDWQTADLPRPRFADQRQIMGATATAIQQSLRLQPADGGADAGDVRSMLGSLGEALTGAFADDPGEDGG

SEQ ID NO: 2989 - protein, 170 aa, Artificial Sequence
  Description of Artificial Sequence: Synthetic polypeptide
MAARPITDTDREQVKALHAEGMSRNDIARRMKRSPSTVSKLAAEQGLTFERGPEVVAATEARRIDLAARRQALAEQLHQDAEQLRAQLWEPCTIGEFAGREGDWQTADLPRPRFADQRQIMGATATAIQQSLRLQPADGGADAGDVRSMLGSLGEALTGAFADDPGKDGG

SEQ ID NO: 2990 - protein, 168 aa, Artificial Sequence
  Description of Artificial Sequence: Synthetic polypeptide
MARKSLYEKLDIETRLPEIEQMARNGYRDIDICKALGISHQTFYNWLEKYPEFAEAVRKGKEVVDAEIENKLLENARGHYYWEETQELMEVRDPITGETKKELVTTKRVLKYVKPDTTAQIFWLKNRRPDVWRDKQHIEHSGEVGVKDLSYLSDEELDKELKELQGDE

SEQ ID NO: 2991 - protein, 167 aa, Artificial Sequence
  Description of Artificial Sequence: Synthetic polypeptide
MATVVVDGKERSSNYDRHHNKILEAWFDENSEGPYPTLRQKKELANDTGLTLKQVNTWFTNTRKRLKTRRSGTVRRQYFSEDQINILRNWGLNNWKYPYPTPKEKERMADEAKLTYDQVQHWFINWRMRVWRRANRKERPASSETVQVTPVTTGLLRTRLSDFRPLA

SEQ ID NO: 2992 - protein, 166 aa, Artificial Sequence
  Description of Artificial Sequence: Synthetic polypeptide
MRKLTTTDIQEIYVSTQTQKELASQYNVSIPLISNIMNGKIYRRYTSTLKKPQRKKYNREPRFTQEQIINIYTSLEPINTIAKRYSVARETISRIKNDVHYTEFTKELSNPKIHKRIDRLDVIDIYLDDRSAKEIAQEYRTSISTVYNIKNKKCHRNITDELDKDY

SEQ ID NO: 2993 - protein, 165 aa, Artificial Sequence
  Description of Artificial Sequence: Synthetic polypeptide
MSKYITGKKASEMLKVHQRTLHNWDRKGIIDTIRGPGGRRLYNVKKYLEEYEDDIDIDTEEDEQEDNEKMKIAYVRVSTHGQKDDMQRQIKYMKKHYPNHKIIQDIGSGINFNRKGLRKIIKWAIEGNVKELVVAYKDRLTRFGFELIEDLIKEYSGGTIKTKLS

SEQ ID NO: 2994 - protein, 164 aa, Artificial Sequence
  Description of Artificial Sequence: Synthetic polypeptide
MLIGYVRVSTNDQNTDLQRNALECAGCELIFEDKISGTKSDRPGLKKLLRTLSEGDTLVVWKLDRLGRSMRHLVILVEELRERGVNFRSLTDAIDTSTPMGRFFFHMMGALAEMERELIVERTRAGLEAEPKVVLVADDRNSPRVSGSRSDGCWLRGNLVNVWH

SEQ ID NO: 2995 - protein, 163 aa, Artificial Sequence
  Description of Artificial Sequence: Synthetic polypeptide
MTDICGVETTKGEPCQNPVESCPWHDSDNDVDAGRPTKLTKQREEGIASMIEEGHSQASAARAHGIDPHTLTNWINKGREQDQGIFSDFFSRIARARAYSEQQYVKELRHMADEVNDTNTLRWMLQQRFPESWGESDALGGESEEWNVSSEVVEVVSSTTELE

SEQ ID NO: 2996 - protein, 162 aa, Artificial Sequence
  Description of Artificial Sequence: Synthetic polypeptide
MPYINENIELHGNAKRIEYEIDNNSCWNCTSHSKDSFGYCFITRTGMQGATYIHRYVYTIHNGDIPQDMVIRHKCDNPSCINPSHLEVGTQQENLKDAESRGRAAIKSGSGNIKAKLSEEQVKEIKELLKKGVVQKEIASTYGVGNSTISRIKHNVSWSATK

SEQ ID NO: 2997 - protein, 162 aa, Artificial Sequence
  Description of Artificial Sequence: Synthetic polypeptide
MPYINENIELHGNAKRIEYEIDNNSCWNCTSHSKDSFGYCFITRTGMQGATYIHRYVYTIHNGDIPQDRVIRHKCDNPSCINPSHLEVGTQQENLKDAESRGRAAIKSGSGNIKAKLSEEQVKEIKELLKKGVVQKEIASTYGVGNSTISRIKHNVSWSATK

SEQ ID NO: 2998 - protein, 162 aa, Artificial Sequence
  Description of Artificial Sequence: Synthetic polypeptide
MTDICGVETTKGEPCQNPVESCPWHNVDEKPDTGRDTKLSLERQEQIATAIEQGKSLTSAARMAGVDRTTVYGWIDRGEADAESGEENVFTEFYHRLTRAKGHGEDFYFELALELARENGDHQFIASLMKQRYPDSWGETETGVSSPDIEISVSEATYETWQ

SEQ ID NO: 2999 - protein, 162 aa, Artificial Sequence
  Description of Artificial Sequence: Synthetic polypeptide
MTDICGVETTKGEPCQNPAESCPWHDVDEKPDTGRNTKLSLERQEKIASAIEQGKSITSAARMAGVDRTTVYGWLDRGEADIESGKENVFTEFYHRLTRAKGHGEDFYFELALDLARENGDHQFIASLMKQRYPDSWGETETGVSSPDIEISVSEATYETWQ

SEQ ID NO: 3000 - protein, 161 aa, Artificial Sequence
  Description of Artificial Sequence: Synthetic polypeptide
MPYIEEKVKLHGNAKRIEYEINDDGCWNCISHVETKFGHNQITRKGFPLMHVHNYVYRITKGDIPKNNVVRHKCDNPNCINPNHLEIGTQKDNMKDAEIRGRAKIRSGSGNIKAELTEKQVKEIRKLLNEGIMQKDIVNMYGISKSTVSKIKNNILWKNVI

SEQ ID NO: 3001 - protein, 161 aa, Artificial Sequence
  Description of Artificial Sequence: Synthetic polypeptide
MLVPKEKKLIPNELLPPKYQNKGYRMSPNGDVYGVFGKKLKPNDWSPNGFNHPLLFNRNLWYIRATMFVPNPENHKRVVLIGDDVHWLSEKKYREMVNHYLGREAVERVPLKDRGEVLDEMLEKGAKIADIARALGYSRAAIYKYLEKNNYEYKNQKLKRK

SEQ ID NO: 3002 - protein, 158 aa, Artificial Sequence
  Description of Artificial Sequence: Synthetic polypeptide
MKQRSDCLNDKDVEIVNDSYKRLRELSEDESNAVYLLISGLTVTEVAKAIGVTRQTIYNWMNREHIRKEIDRRKQELTNQGNLLILKDLETYINNIKELASDKSDKRVMLAANQYLINRIYGTPTNTIIQAEDDSGGMGMDTTEIEAAIAKIRIRTKK

SEQ ID NO: 3003 - protein, 158 aa, Artificial Sequence
  Description of Artificial Sequence: Synthetic polypeptide
MGRRTFFTEHQNQILAMWFDEKSKNSYLNSGQKEELAAEIGLTPKQVETWFSNTRKRLRRPSPRPRSDTRPNFTKEQVKTLSEWVSLNSKYPYPTQKEKNQFVLTTKLTYLQVQNWFINWRTRVWKPNHKKGDSIVITKKIDAPILLRTRLSDFRTSR

SEQ ID NO: 3004 - protein, 157 aa, Artificial Sequence
  Description of Artificial Sequence: Synthetic polypeptide
MTCNRQPKVVHYRGKSGDTSKAEWARLRKRALALVDEDWKSREVAEELGVSQDTVSKWVERYRRLTHRRGGCFYGPCKEWGCTAGVQTKHGYCTHHTNLRVWCGYRPRVRRAPGPCANAPSCPRLAGTGQGGAKGLCRGCYQRARRALRRVAEEVGL

SEQ ID NO: 3005 - protein, 155 aa, Artificial Sequence
  Description of Artificial Sequence: Synthetic polypeptide
MPFSISGRKGSEMMAKLDELKQKLTAKQIQAAYLLVENELMESNNEEKRTQDEMANELGINRTTLWEWRTKNQDFIAFKSEVADSFLAEKREQVYSKLMQLILGPQPSVKAMQLYMQRFGLLTDKKVIEGDLGNATRTNAEIEEQLQKLKKLTGE

SEQ ID NO: 3006 - protein, 154 aa, Artificial Sequence
  Description of Artificial Sequence: Synthetic polypeptide
MLNKFEKKEVRTVITGLLTHACGRCTTPNECDDCPIQETMQAMNKQLINDPDWSKKRHNLTTEAYRSLRAKGKQDREICEMFNMTRHQLYRFKKKEKIISDRLTHEDYLEIRRMRKEGRPYKEIAERFGISRGYASEIARGKKFGEVVEMEEAN

SEQ ID NO: 3007 - protein, 152 aa, Artificial Sequence
  Description of Artificial Sequence: Synthetic polypeptide
MQEWVRITSYPNYAVSNEGEVKNINTGCVLRPLTLTKGYLGVRLYHEGNGKTLKIHRLVALAFLSNPDNLPQVNHIDGDKSNNDVTNLEWCSNEYNMRHAADNDLLNKETQFKQKYDPSEFRKCKEEGMTISAIARKFGCKRDTVYRLLRLR

SEQ ID NO: 3008 - protein, 150 aa, Artificial Sequence
  Description of Artificial Sequence: Synthetic polypeptide
MSNGELFDSGEVDKLEPDKVLAHMNDAVVLARWQGTLNEMASIAEHKLRQLLPDKPDEVPTIARAMVYAICETMGGAVVYIPRGDGLRRAIRDMEIFREWREKNARPDALARKFDLSSQAVYDIIARQRALHRQQEPDLFGYEDAPKRLH

SEQ ID NO: 3009 - protein, 149 aa, Artificial Sequence
  Description of Artificial Sequence: Synthetic polypeptide
MSELEELRAEVERLRARADECDRCRGHARGDVIEDLALKGHTTPEIAKMLGVDKRTVNYWRKKRGVPGKRVYATGRTEYATPEQIVKLRELLADGASLAEAARTLGLNEGTVRNVHRGEGWTTEESIDHLTTLRRHGHALGTKGRASWT

SEQ ID NO: 3010 - protein, 148 aa, Artificial Sequence
  Description of Artificial Sequence: Synthetic polypeptide
MEVDYVTTKETCRITGFKAPTLRGWSNVGKVKTTRTLANQWLYDRQSLLSFIDGVNDGIEKEKIIYCRVSSKKQSEHLEHQIEFCKQYYPDHTVITGISSGINFNRKGIQTVLESAMHGDLEELVVAYKDRLCRFGYELIEWIVGRYG

SEQ ID NO: 3011 - protein, 147 aa, Artificial Sequence
  Description of Artificial Sequence: Synthetic polypeptide
MLKCQYCGSTLKRQVSYKKKIVWCCSKYIKEGKNSCKGMRVPERDIEDWKLSSPVIVLERIEDGEKHYGYTGQKATANSHISNSEKIRVAAYCRVSTDQDEQLSSYENQVNYYREYILKHEDYELVDIYADEGISATNTKNVMLLTD

SEQ ID NO: 3012 - protein, 146 aa, Artificial Sequence
  Description of Artificial Sequence: Synthetic polypeptide
MFISLNKEEEKILGTENKKEFTPLKKDKRFNTIKEQQIVTLYEEGAPFKEISKAVKVSTGMIYSVINSYKVEKRNKKSRVSERVAHVLNDVEKTKQLIKDYHFMNVEDIYKKYNIHKNGLYYILDLYNVERKTGSKEEVLNDEQEE

SEQ ID NO: 3013 - protein, 145 aa, Artificial Sequence
  Description of Artificial Sequence: Synthetic polypeptide
MANPRRMKALEAKLTAQQRKAAYLVVENELLPTKERRTKEEIATEVGVTYKTIWSWTTRNRDFIEYKNAIADDFLETEREAVYSNLMQLIKAPQPSVKAIDLYLRRFGLLTEKQIVTTDTGEGARTDADLEQELGELDELLKDDD

SEQ ID NO: 3014 - protein, 144 aa, Artificial Sequence
  Description of Artificial Sequence: Synthetic polypeptide
MELPRTVQEIADVIGRERALYLIGQLPKLWVPSQQYHKVILYVPKRIRPNDPLVKILGWSDASKMVQHFGGEMLHPANCEYIYRRFIHSSIKRMHSEGMDAKAIAELLDVSERTVKRHCTDKPHKDTSPANDNTPERLLTAMGQ

SEQ ID NO: 3015 - protein, 144 aa, Artificial Sequence
  Description of Artificial Sequence: Synthetic polypeptide
MELPRTVQEIADVIGRERALYLIGQLPKLWVPSQQYHKVILYVPKRIRPNDHLVKILGWSDASKMVQHFGGEMLHPANCEYIYRHFIHRSIKRMHGEGMDAKAIAELLEVSERTVKRHCTDKPHKDTSPANDNHQHRLLMTTGQ

SEQ ID NO: 3016 - protein, 143 aa, Artificial Sequence
  Description of Artificial Sequence: Synthetic polypeptide
MVILNIYYNYIIIVPEISRLGRNMNEVNEIIGICGRKKVMIINIQNKLKLDGSLQTSIMANLYTIFSQMERQLISERTKQGLLIAKQKGHLTGRARGIKKNKLDGKDNEIKKLIDEKKSIRQIAKELNVKHPQLLKYISDKNL

SEQ ID NO: 3017 - protein, 142 aa, Artificial Sequence
  Description of Artificial Sequence: Synthetic polypeptide
MPNKFDDLSEQQKRAAELLLENDLAPKAEKRKLEDIAEEVGVARKTLWDWRRRNTLFIEYKQHLTTLSLQDAHGELARVLITNLQSSQPSTKMLDLLAKMTPNALAANRQEVVMETNETSNEEVMKRIEELRKMQESVKQDE

SEQ ID NO: 3018 - protein, 142 aa, Artificial Sequence
  Description of Artificial Sequence: Synthetic polypeptide
MTTAVVNKQGNRPAKYKQSIMARLMELVAEGKTTRECVQELDVSWTTLRKWLKEKNYQDLYRVAQSDQVILNNEKLDIILEDAHKRAKTKDITMTEVKLIELMQKNYHHKNSKLNPTTWGSDKQTMSISDSKGQEFKVEWSK

SEQ ID NO: 3019 - protein, 141 aa, Artificial Sequence
  Description of Artificial Sequence: Synthetic polypeptide
MPAFEWVHVQLHQQKGMISLSPPTICNSAADMIQLIKEFDAQGVAVRFIDDGISTDGDMGQMVVTILSAVAQAERRRILERTNEGRQEAKLKGIKFGRRRTVDRNVVLTLHQKGTGATEIAHQLSIARSTVYKILEDERAS

SEQ ID NO: 3020 - protein, 141 aa, Artificial Sequence
  Description of Artificial Sequence: Synthetic polypeptide
MVKIAKGKYKEWLTNEKLDIVAGWAQDGLTNNDIAYNIGINPDTLYTWIKKYPEFSEALKVNKEVADRRVENALYKSAIGFTYEEETVTNQGEVVTVKKYSKPNTTAQIFWLKNRKQEWSDRQEIEHTGTVVFANEDNIPD

SEQ ID NO: 3021 - protein, 140 aa, Artificial Sequence
  Description of Artificial Sequence: Synthetic polypeptide
MQHDLFEHDPAIRQLIGHIDNIPAPELESRWPRSVVDLIDVLENELKRQNVSNPRELARKQAVALSCFLGGRQFYIPCGDTILTALRDDLLYCQFNGRNMEELRRQYRLSQPQIYQIIARQRKLHTRRHQPDLFSPESPK

SEQ ID NO: 3022 - protein, 140 aa, Artificial Sequence
  Description of Artificial Sequence: Synthetic polypeptide
MQHDLFEHDPAIRQLIGHIDNIPAPELESRWPRSVVDLIDVLENELKRQNVSNPRELARKQAVALSCFLGGRQFYIPCGDTILTALRDDLLYCQFNGRNMEELRRQYRLSQPQIYQIIARQRKLHTRRHQPDLFSPETPK

SEQ ID NO: 3023 - protein, 140 aa, Artificial Sequence
  Description of Artificial Sequence: Synthetic polypeptide
MPCGWEAVMSEENQDLFGYKNVSLEEVEKLADDEEHQRWPEAMRQIYCIFKDELVKNETDPKLAVVLLHRICKEFGGVQLYLPRGRQLESEIMNLSIWREFNGANVEELSRKYDKSMQHIYRVVAKMRKIEVKNRQPNLF

SEQ ID NO: 3024 - protein, 140 aa, Artificial Sequence
  Description of Artificial Sequence: Synthetic polypeptide
MQHDLFEHDPAIRQLIGHIDNIPAPELESRWPRSVVDLIDVLENELKRQNVSNPRELARKQAVALSCFLGGRQFYIPCGDTILTALRDDLLYCQFNGRNMEELRRQYRLSQPQIYQIIARQRKLHTRRHQPDLFSPESQK

SEQ ID NO: 3025 - protein, 140 aa, Artificial Sequence
  Description of Artificial Sequence: Synthetic polypeptide
MKHTPYGYIIVDGKAVVNEKEAKRLQKICDNYLSGMSFVASAKSVGLKMQHSGVKRLMLNKRYLGDDFYPAILTEGIVNKIEEERARREKALGRDRKKQGKTVRGVVYTKFLIPQIDVKYENPMRQAEYAYSLIGNEVST

SEQ ID NO: 3026 - protein, 138 aa, Artificial Sequence
  Description of Artificial Sequence: Synthetic polypeptide
MAYIPYGYKIQDGVVTVDEKAAGQVKVFFEKYISGLSLTVAGEQAGIDKTHSVMGRILKNVNYLGNDTYPAIIDKEIFDKAEEVRDKRAKDLGRVVELAAFTSPPPKERFKMRKADNKMPVDPFERAEYLYSLIESEE

SEQ ID NO: 3027 - protein, 138 aa, Artificial Sequence
  Description of Artificial Sequence: Synthetic polypeptide
MEKCTYTRKYKNEDEKGGTPYGYARSSNEDGIKRQIEWLKDKGVKEVYIDKNAKVELNKLLNILKEGDTLITRGIDRITRDIKGLEEIIEFAKNKRVKFVLGDKIIDGINGVDPSIERMSAVLNTFKECEDKIVGIEE

SEQ ID NO: 3028 - protein, 138 aa, Artificial Sequence
  Description of Artificial Sequence: Synthetic polypeptide
MTHTPYGYRIENGIAVVDEVDAERIKALYQEYIDCKSMRAATKKAGIDKTHSVIGRILKNKVYLGTVYYPQIIDEDIFAKAQEIREHNVRSQNRIGIYRPHPKAEIGAFKIRKTEEKYKDPYKQAEYAYSQILEVANE

SEQ ID NO: 3029 - protein, 136 aa, Artificial Sequence
  Description of Artificial Sequence: Synthetic polypeptide
MNVSIRAIQAIMENAIEDGKNVRVGNIERALGYYRCSWGEEFSKVTGLTPASYMRYFRMRCICQDLATSKHSLLDIAEYYGRSLSYFCRDFKKLIGMTPGEYRKLNHNGRAVVLHSVFWAYPFLTDFTSFRPLLLK

SEQ ID NO: 3030 - protein, 136 aa, Artificial Sequence
  Description of Artificial Sequence: Synthetic polypeptide
MADILTTKESDMITMLIEGVGITDIAKKLNVTRQTIYNWSNKDNVKAELDRRRRDLSHQGNNLIMKDLTTYVDNIKELANDKSDKRVSLAANQYLLNRIYGSPVGNVVDGKIDNNPVQDINELENELNNFRLKKVK

SEQ ID NO: 3031 - protein, 136 aa, Artificial Sequence
  Description of Artificial Sequence: Synthetic polypeptide
MNVSIRAIQAIMENAIEEGKNVRVGNIERALGYYRCSWGEEFSKVTGLSPASYMRYFRMRCICQDLATSKHSLLDIAEYYGRSLSYFCRDFKKLTGMTPGEYRNLNHNGRVIVLHSVFSAYPFLTDFTSFRPLLLK

SEQ ID NO: 3032 - protein, 136 aa, Artificial Sequence
  Description of Artificial Sequence: Synthetic polypeptide
MNVSIRAIQAIMENAIEDGKNVRVGNIERALGYYRCSWGEEFSKVTGLSPASYMRYFRMRCICQDLATSKHSLLDISEYYGRSLSYFCRDFKKLIGMTPGEYRNLNHNGRVIVLHSVFSAYPFLTDFTSFRPLLLK

SEQ ID NO: 3033 - protein, 133 aa, Artificial Sequence
  Description of Artificial Sequence: Synthetic polypeptide
MTMARPTKYDPKFCDEAREMMADGYSTKAFAGYIGVSLSTVYKWMEENPEFSEAIKSAQAAGAFWWEKTLKHVASTGEGNASAAIFGVKNRSQEEWKDKVENDHTSSDGSMSPRGKTLEDFYADEDVPPQSSP

SEQ ID NO: 3034 - protein, 133 aa, Artificial Sequence
  Description of Artificial Sequence: Synthetic polypeptide
MTHIASEKLEQIQDLLDNQLSHTEIAKRLRVSRNTIRYYFPDTSLSREETLARANAARLDGRRIVRPGETEKFDKCLVCGTDRQQQRRWQKQGIGFKCSFGRSHKYAEYVLPDNPDCRRCQGQKSVHHTCQSN

SEQ ID NO: 3035 - protein, 133 aa, Artificial Sequence
  Description of Artificial Sequence: Synthetic polypeptide
MTHIASEKLEQIQDLLDNQLSHTEIAKRLRVSRNTIRYYFPDTSLSREETLARANAARLDGRRIVRPGETEKFDKCLVCGTDRQQQRRWQKQGIGFKCSFGRSHKYAEYVLPDNPDCRRCQGQKSVHHTCQNN

SEQ ID NO: 3036 - protein, 132 aa, Artificial Sequence
  Description of Artificial Sequence: Synthetic polypeptide
MAGGRPTLYRPEYCETVIELGKQGDSLAQMAAHFDVSRQTIENWASDHPEFLAALSRAKVHCQAWWEKAGREGMFLGGGGFNAAVWKKSMEARFREDYTERQEVHQTGTMEHKHSIGEMTDEDLAKVIAGEK

SEQ ID NO: 3037 - protein, 132 aa, Artificial Sequence
  Description of Artificial Sequence: Synthetic polypeptide
MPCGWEAVMSEENQDLFGYKNVSLEEVEKLADDEEHQRWPEAMRQIYCIFKDELVKNETDPKLAVVLLHRICKEFGGVQLYLPRGRQLESEIMNLSIWREFNGANVEELSRKYDKSMQHIYRVVAKNAQDRS

SEQ ID NO: 3038 - protein, 132 aa, Artificial Sequence
  Description of Artificial Sequence: Synthetic polypeptide
MSEENQDLFGYKNVSLEEVEKLADDEEHQRWPEAMRQIYCIFKDELVKNETDPKLAVILLHRICKEFGGVQLYLPRGRQLESEIMNLSIWREFNGANVEELSRKYDKSMQHIYRVVAKMRKIEVENRQPNLF

SEQ ID NO: 3039 - protein, 132 aa, Artificial Sequence
  Description of Artificial Sequence: Synthetic polypeptide
MFRKNQDYFIDEIGNVTRKDGTIVKPQESPNGLGHPIVLRQNAWRLSALVHKLDNPNNYKHIVEIDGKLHWIKEETYHKMVEALVGRPNVKAPIPKHKRDFIFEQHGSMTITAIAKHLDISRMSVYRILKGA

SEQ ID NO: 3040 - protein, 131 aa, Artificial Sequence
  Description of Artificial Sequence: Synthetic polypeptide
MADTLHTVPTKPLTKEDRIELGRKAVAINKGEGKPVTQIAREMGISDKTLGYYITVYKKSLRTKKEEMADSLLYPVMRSEKTSLVKVPNEELDKLRSENTDLKEKNAELQRSVKALQNVILILGHQHSEDD

SEQ ID NO: 3041 - protein, 129 aa, Artificial Sequence
  Description of Artificial Sequence: Synthetic polypeptide
MTEDLFGDLQDDTILAHLDNPAEDASRFPALLAELNDLLRGELSRLGVDPAHSLEIVVAICKHLGGGQVYIPRGQVLDSLIRDLRIWNDFNGRNVSELTTRYGVTFNTVYKAIRRMRRLKYRQYQPSLL

SEQ ID NO: 3042 - protein, 129 aa, Artificial Sequence
  Description of Artificial Sequence: Synthetic polypeptide
MTEDLFGDLQDDTILAHLDNPAEDTSRFPALLAELNDLLRGELSRLGVDPAHSLEIVVAICKHLGGGQVYIPRGQALDSLIRDLRIWNDFNGRNVSELTTRYGVTFNTVYKAIRRMRRLKYRQYQPSLL

SEQ ID NO: 3043 - protein, 129 aa, Artificial Sequence
  Description of Artificial Sequence: Synthetic polypeptide
MRHLVMLTEELREKGINFRSLTDSIDTSTPMGRFFFHVMGALAEMERELIVERTRAGLAAAREKGRIGGRRRIMTPEVVSRAERMLANGATLHQIALVLEVSVKTLYRYIPAEKQQHLRDSVLPETSKP

SEQ ID NO: 3044 - protein, 128 aa, Artificial Sequence
  Description of Artificial Sequence: Synthetic polypeptide
MSRKRMLSENDVKEILQLRDEGISRRQVSKMYNVAEGTLYLIEKGKLYKDVLKKLGKEHEPIKDRSQIKLNNRKLKEKDIIEIFELLNNNVSKKDIIEQFNISYSLLTNILNGTAYNDIVQKHNLIAK

SEQ ID NO: 3045 - protein, 126 aa, Artificial Sequence
  Description of Artificial Sequence: Synthetic polypeptide
MSSKPKPGFMRPRANRDEMAARIQRVREMLAAGAKVKDIASELDVSRAAVYRIIQDHADLQINRATDPVSLCGTLGRLRATLEAQDRGFLNWIANNRVEGTTVAEFLVSCAVDAYHDETSETAAAA

SEQ ID NO: 3046 - protein, 126 aa, Artificial Sequence
  Description of Artificial Sequence: Synthetic polypeptide
MKRKELRKVNKKGISKRQQRAIEMLLDIEKDYTKKEIAAKLGISETALYKWFKKEEFVEELNKQSEEFFKRSKNIVNKALLKKIMKGDVSAMRLYYEKENEFVQKHQFSGNFELVIDGNEINDSED

SEQ ID NO: 3047 - protein, 126 aa, Artificial Sequence
  Description of Artificial Sequence: Synthetic polypeptide
MKRKELRKVNKKGISKRQQRAIEMLLDIEKDYTKKEIAAKLGISETALYKWFKKEEFVEELNKQSEEFFKRSKNIVNKALLKKIMKGDVSAMRLYYEKENEFVQKHQFSGNFELVIDGNEINDSEN

SEQ ID NO: 3048 - protein, 126 aa, Artificial Sequence
  Description of Artificial Sequence: Synthetic polypeptide
MSSKPKPGFMRPRANREEMAARIQRVREMLAAGAKVKDIATDLDVSRAAVYRIIQDHADLQINRATDPVSLCGTLGRLRATLETQDRGFLNWIANNRVEGTTVAEFLIACAVDVYHDETSETAAAA

SEQ ID NO: 3049 - protein, 125 aa, Artificial Sequence
  Description of Artificial Sequence: Synthetic polypeptide
VAKSNAGRPSKYDDSFLGITEKYLAQGKSVTQLAKHLNVAKSTIYKWAEENKEFSDALNIGREFSQAHWEDKLEDMMFNKEVNSPLVKLYFANRFGWSDKVESKNENANVEKVKSFSEMYGNVKS

SEQ ID NO: 3050 - protein, 124 aa, Artificial Sequence
  Description of Artificial Sequence: Synthetic polypeptide
MSTNADIFDEKAPEILADLAKHIETQLLAKVKNNEFNSELAKQIGIEVASHIAQSWGGEVIYIPRNLVLLLSERDRKIFNEFNGSNHRELARKYNVSMQWIYQIVKKVTKEEIARRQFDMFGNT

SEQ ID NO: 3051 - protein, 124 aa, Artificial Sequence
  Description of Artificial Sequence: Synthetic polypeptide
SKSNAGRPSKYDDSFLGVTEKYLAQGKSVTQLAKHLNVAKSTIYKWAEENKEFSDALNIGREFSQAHWEDKLEDMMFNKDVNSPLVKLYFANRFGWSDKVESKNENANVEKVKSFSEMYGNVKS

SEQ ID NO: 3052 - protein, 123 aa, Artificial Sequence
  Description of Artificial Sequence: Synthetic polypeptide
MKDETFKSKGPELLVDLSLQVAQALIELADIGVDQANQLGREIADRMAGHWGGQNIYFPMGVSYRLSQRDRQIFDEFRGDNHAELARKFGVSLQWIYKIIKAVRREEIAARQRDLFASPTSTD

SEQ ID NO: 3053 - protein, 123 aa, Artificial Sequence
  Description of Artificial Sequence: Synthetic polypeptide
MKDETFKSKGPELLVDLSLQVAQALIELADIGADQANQLGREIADRMAGHWGGQNIYFPMGVSYRLSQRDRQIFDEFRGDNHAELARKFGVSLQWIYKIIKAVRREEIAARQRDLFASPTSTD

SEQ ID NO: 3054 - protein, 123 aa, Artificial Sequence
  Description of Artificial Sequence: Synthetic polypeptide
MAKLGRPTKYSDDVGEIVLDLMDKGKSICQVARHLNVCRKTIYNWMDENEDFLHTVTRAKDYSEAYWETEFQKMMYSRDSQPQLVRLYMGSRFGWREQDQTVNDDQATPKSIKVEVIDARQSN

SEQ ID NO: 3055 - protein, 123 aa, Artificial Sequence
  Description of Artificial Sequence: Synthetic polypeptide
LTKQKIGRPTKYKDEYCDKAIKFLAGGKSVTQLSAHIDVCKDTIYEWAKVHQDFSDALTRGKELSQAHWESELVNMMYNKEVNSPLVKLYFANRFGWSDKTESKNENANVESVKSFSDMYGNS

SEQ ID NO: 3056 - protein, 123 aa, Artificial Sequence
  Description of Artificial Sequence: Synthetic polypeptide
MSDTIAQATLDIDTLKRGIEVVLDNNSALALENENLRRLADSRYHTIGDLTAQLATAKRAFGDAFVKGIKQSGPTRINRPKLSERDARDIRQAHAGGMKQADLARNYGVNPATISRIVNRVYY

SEQ ID NO: 3057 - protein, 122 aa, Artificial Sequence
  Description of Artificial Sequence: Synthetic polypeptide
MKKHIEMRLADGATLDDIKADVMQTAINTALVACYGSQTKASELLGINRWTMRKWLSNASKRTYKPFDRVCLDVGNGTAKEMLTESYREAVSQVMSTNNNVTMTAEILKCQRGTIRKYMVKP

SEQ ID NO: 3058 - protein, 122 aa, Artificial Sequence
  Description of Artificial Sequence: Synthetic polypeptide
MMTDAGTMDPSDTYRDEDWLRSQHNENERSVQEIADDVGVNPSTIYNWLKKHGIATVKQGGPVYEADTKMLRDEPWLRKQYVDKERSIADIAGEVGVSQPTVSQWLDSHGIESPALEEHERD

SEQ ID NO: 3059 - protein, 122 aa, Artificial Sequence
  Description of Artificial Sequence: Synthetic polypeptide
MTAGRPTKYKEELCKRSVAFLSKGKSVTQLSAHLDVSKSTIYKWAEDHKEYSDALTRGRELSQAHWEGELVDMMYNKEVNSPLVKLYFANRFGWSDKVESKNENANVEKVKSFSEMYGNSST

SEQ ID NO: 3060 - protein, 122 aa, Artificial Sequence
  Description of Artificial Sequence: Synthetic polypeptide
AKSNAGRPSKYDESFLGITEKYLSQGKSVTQLAKHLNVAKSTIYKWAEENKEFSDALNIGREFSQAHWEDKLEDMMFNKEVNSPLVKLYFANRFGWSDKVESKNENANVEKVKSFSEMYAGK

SEQ ID NO: 3061 - protein, 122 aa, Artificial Sequence
  Description of Artificial Sequence: Synthetic polypeptide
SKSNAGRPSKYDDSFLGVTEKYLAQGKSVTQLAKHLNVAKSTIYKWAEENKEFSDALNIGREFSQAHWEDKLEDMMFNKDVNSPLVKLYFANRFGWSDKVESKNENANVEKVKSFSEMYAGK

SEQ ID NO: 3062 - protein, 122 aa, Artificial Sequence
  Description of Artificial Sequence: Synthetic polypeptide
MKKNIEMRLTDGATLNDIKADVMQTAINTALVACHGNQTKASELLGINRWTMRKWLNDASNRTYKLFDRVYLYVGNGTAKEMLTEAYIEAVSQVMQTNNNVTMVAEILKCQRGTVRKYMAKP

SEQ ID NO: 3063 - protein, 122 aa, Artificial Sequence
  Description of Artificial Sequence: Synthetic polypeptide
MKKHIEMRLADGATLNDIKADVMHTAINAALVACHGNQTAASELLQINRWTMRKWLNDASKSAYKPFDVVCLDVGNSTAKEMLTEAYMEATSQVMQTNNNVTLVAEILKCQRSTVRKYMVKP

SEQ ID NO: 3064 - protein, 122 aa, Artificial Sequence
  Description of Artificial Sequence: Synthetic polypeptide
MKQSSILAETRHELLDDIAAHTATVLSEHGIDAGLAEQAGHAVADHLANQWRGATLYIPSDYRHQVTKRDLQILSEFNGRNHHALARKYGLTPSSIYKLLKRIQDRKFERDQGKLDLGDGLA

SEQ ID NO: 3065 - protein, 122 aa, Artificial Sequence
  Description of Artificial Sequence: Synthetic polypeptide
MKQSSILAETRHELLDDIAAHTATVLSEHGIDAGLAEQAGHAVADHLANQWRGATLYIPSDYRHQVTKRDLQILSEFNGRNHHALARKYGLTPSSIYKLLKRIQDRKFEHDQGKLDLGDGLA

SEQ ID NO: 3066 - protein, 122 aa, Artificial Sequence
  Description of Artificial Sequence: Synthetic polypeptide
MKKHIEMRLADGATLNDIKADVMHSAINTALVACHGNQTAASELLQINRWTMRKWLNDASKRTYKPFEQAALCVGASTAKEMLTGAYMEAVSQVMQTNNNVTLAAEILKCQRGTVRKYMVKP

SEQ ID NO: 3067 - protein, 122 aa, Artificial Sequence
  Description of Artificial Sequence: Synthetic polypeptide
MASVDDENSDDDTGRQAFNKRQVDIMRNWSNINFRDPYPTRKEKERMAAETKLTYRQVENWFSNWRMRVWLPNSKRQKSSTMDEEVKEPPSSHTEVAISPVVSTPVTPGLLRCRLSDFREAI

SEQ ID NO: 3068 - protein, 121 aa, Artificial Sequence
  Description of Artificial Sequence: Synthetic polypeptide
MSNGNRLTPEQVKMILSMTREGCSARHIAEVVGCSSRTVVRVRADGDARVMGPELFTPLTQEQKDFARYLLDDGAPYNEVARTLGVSRTTIERNFPGYGWTKRQAAEFTALSKKFRRLEAS

SEQ ID NO: 3069 - protein, 121 aa, Artificial Sequence
  Description of Artificial Sequence: Synthetic polypeptide
MSNGNRLTPEQVQTILLMTREGWSAKDIGEVVGCSARTVVRVRAAGDARLASPDQFVPLSQEQKDFAQYLLDDGAPYNEVARTLGVSRTTVEKYFPGYGWSKKQAAEFTALVKKFRWLEAS

SEQ ID NO: 3070 - protein, 121 aa, Artificial Sequence
  Description of Artificial Sequence: Synthetic polypeptide
MPAPHPKRAEVLALARAGMRPVEIARQLEIASPTVNSMITCARAMGQDVPHFQRARPGTGVRGHLRVPLTDVARADLAEAAASRGVSLPVLASRVLEAAAEDGLVAAVLDDADETGGRADG

SEQ ID NO: 3071 - protein, 121 aa, Artificial Sequence
  Description of Artificial Sequence: Synthetic polypeptide
MSNGNRLTPEQVKTVLAMTRDGFSAKHIGEVIGCSARTVVRVRARGEARVMDPELFTPLTQEQKDFARYLLDDGAPYQEVARTLGVSSTTIEKHFPGRAWTKRQAAEFTALLKKFRRLEAS

SEQ ID NO: 3072 - protein, 121 aa, Artificial Sequence
  Description of Artificial Sequence: Synthetic polypeptide
MSNGNRLTPEQVQTILLMTREGWSAKHIGEVVGCSARTVVRVRAAGDARLASPDQFVPLSQEQKDFAQYLLDDGAPYNEVARTLGVSRTTVEKYFPGYGWSKKQAAEFRALVKKFRWLEAS

SEQ ID NO: 3073 - protein, 121 aa, Artificial Sequence
  Description of Artificial Sequence: Synthetic polypeptide
MSNGNRLTPEQVKTVLAMTRDGFSAKHIGEVIGCSARTVVRVRARGEARVMDPELFTPLTQEQKDFARYLLDDGAPYEEVARTLGVSSTTIERHFPGRGWTKRQAAEFTALLKKFRRLEAS

SEQ ID NO: 3074 - protein, 121 aa, Artificial Sequence
  Description of Artificial Sequence: Synthetic polypeptide
MSNGNRLTPEQVQTILLMTREGWSAKHIGEVVGCSARTVVRVRAAGDARLASPNQFVPLSQEQKDFAQYLLDDGAPYNEVARTLGVSRTTVEKYFPGYGWSKKQAAEFRALVKKFRWLEAS

SEQ ID NO: 3075 - protein, 121 aa, Artificial Sequence
  Description of Artificial Sequence: Synthetic polypeptide
MSKRWTAEEDKLLAVLMLKYIQGGESVRKSALIASKEMKNRTYEACYTRWTKTLKKKNDSPLKKEDYDKAFITLIIDLFKENQLLSYRLTGLERKYQKIEKKIEIEQKPVRRIGFLIEENE

SEQ ID NO: 3076 - protein, 121 aa, Artificial Sequence
  Description of Artificial Sequence: Synthetic polypeptide
MSNGNRLTPEQVQTILLMTRERCSAKHIGEVVGCSARTVVRVRAAGDARLASPDQFVPLSQEQKDFAQYLLDDGAPYNEVARTLGVSRTTVKKYFPGYGWSKKQAAEFRALVKKFRWLEAS

SEQ ID NO: 3077 - protein, 121 aa, Artificial Sequence
  Description of Artificial Sequence: Synthetic polypeptide
MSNGNRLTKEQVKMILSMTRDGFSARHIAEVVGCSPRTVTRVRAAADARVMNPDRFTPLTADQLEFAEYLVEDGASYQEVARTLGVSRTTIERHFPGRAWTKRQAAEFTALLKKFRRLEAS

SEQ ID NO: 3078 - protein, 121 aa, Artificial Sequence
  Description of Artificial Sequence: Synthetic polypeptide
MSNGNRLTPEQVKTVLAMTRDGFSAKHIGDVIGCSARTVVRVRARGDARVMDPELFTPLTQEQKDFARYLLDDGAPYQEVARTLGVSSTTIEKHFPGRAWTKRQAAEFTALLKKFRRLEAS

SEQ ID NO: 3079 - protein, 121 aa, Artificial Sequence
  Description of Artificial Sequence: Synthetic polypeptide
MSNGNRLTNEQVKRILSMTRDGFSARHIAEVVGCSPRTVTRVRAAADARVMNPDRFTPLTADQLEFAEYLLEDGAPYQEVASTLGVSRTTIEKHFPGRAWKPKQIAEYQSLMVRFRRLEAS

SEQ ID NO: 3080 - protein, 121 aa, Artificial Sequence
  Description of Artificial Sequence: Synthetic polypeptide
MSNGNRLTPEQVKTVLAMTRDGFSARHIAEVVGCSPRTVTRVRAAADARVMNPDRFTPLTADQLEFAEYLLEDGAPYQEVASTLGVSRTTIEKHFPGRAWKPKQIAEYQSLMVRFRRLEAS

SEQ ID NO: 3081 - protein, 121 aa, Artificial Sequence
  Description of Artificial Sequence: Synthetic polypeptide
MSNGNRLTNEQVKMILAMTRDGFSARHIAEVVGCSPRTVTRVRAAADARVMNPRRFTPLTADQLEFAEYLLEDGAPYQEVARTLGVSRTTIEKHFPGRAWTKRQAAEFTALLKKFRRLEAS

SEQ ID NO: 3082 - protein, 121 aa, Artificial Sequence
  Description of Artificial Sequence: Synthetic polypeptide
MSNGNRLTPEQVQTILLMTREGWSAKHIGEVVGCSARTVVRVRAAGDARLASPDQFVPLSQEQKDFAQYLLDDGAPYREVARTLGVSRTTVEKYFPGYGWSKKQAAEFRALVKKFRWLEAS

SEQ ID NO: 3083 - protein, 121 aa, Artificial Sequence
  Description of Artificial Sequence: Synthetic polypeptide
MSNGNRLTNEQVKRILSMTRDGFSARHIAEVAGCSPRTVTRVRAAADARVMNPDRFTPLTADQLEFAEYLLEDGASYQEVARTLGVSRTTIEKHFPGRAWTKRQAAEFTALLKKFRRLEAS

SEQ ID NO: 3084 - protein, 121 aa, Artificial Sequence
  Description of Artificial Sequence: Synthetic polypeptide
MSNGNRLTPEQVQTILLMTREGWSAKHIGEVVGCSARTVVRVRAAGDARLASPDQFVPLSQEQKDFAQYLLDDGAPYNEVARTLGVSWTTVKRYFPGYGWSKKQAAEFTALVKKFRWLGAS

SEQ ID NO: 3085 - protein, 121 aa, Artificial Sequence
  Description of Artificial Sequence: Synthetic polypeptide
MSNGNRLTPEQVKMILSMTREGCSARHIAEVVGCSSRTVVRVRADGDARVMGPELFTPLTQEQKDFARYLLDDGAPYNEVARTLGVSWTTIERNFPGYGWTKRQAAEFTALSKKFRRLEAS

SEQ ID NO: 3086 - protein, 121 aa, Artificial Sequence
  Description of Artificial Sequence: Synthetic polypeptide
MSNGNRLTPEQVQTILLMTREGWSAKHIGEVVGCSARTVVRVRAAGDARLASPDQFVPLSQEQKDFAQYLLDDGAPYNEVARTLGVSRTTVERYFPGYGWSKKQAAEFTALVKKFRWLEAS

SEQ ID NO: 3087 - protein, 121 aa, Artificial Sequence
  Description of Artificial Sequence: Synthetic polypeptide
MSATSTQQRATIADRRALVTDLTRAGLSAPQIAERLGITTRTVQRHRVAAGIAQPPARHLTPEQIEKARQLLVDGASYKEAARTIGCDKATVAKRFPGYAWTLSECGRWGRFLDRTRERSA

SEQ ID NO: 3088 - protein, 120 aa, Artificial Sequence
  Description of Artificial Sequence: Synthetic polypeptide
MTTNVPIHREEVARRREAIAELTRAGLSAPEIAIRLNVTARTVVRHRALAGVSKPTHPRLTEEQLATARRLIDEGAPYKEIARTIGCHECTVAQRFPGRGWTRKQIDEWRRERRLWADAS

SEQ ID NO: 3089 - protein, 120 aa, Artificial Sequence
  Description of Artificial Sequence: Synthetic polypeptide
MTTNVPTDREEVARRREAIAELTRAGLSAPEIALRLNVTARTVVRHRALAGVSKPTYPRLTEEQLATARRLIDEGAPYKEIARTIGCHESTVAQHFPGRGWTRKQIDEWRREVRLWVDAS

SEQ ID NO: 3090 - protein, 120 aa, Artificial Sequence
  Description of Artificial Sequence: Synthetic polypeptide
MTTNVPIHREEVARRREAIAELTRAGLSAPEIAIRLNVTARTVVRHRALAGVSKPTHPRLTEEQLATARRLIDEGAPYKEVARTIGCHECTVAQRFPGRGWTRKQIDEWRREVRLWADAS

SEQ ID NO: 3091 - protein, 120 aa, Artificial Sequence
  Description of Artificial Sequence: Synthetic polypeptide
MTTNVPTDREEVARRREAIAELTRAGLSAPEIAIRLNVTARTVVRHRALAGVSKPTHPRLTEEQLATARRLIDEGAPYKEIARTIGCHESTVAQHFPGRGWTRKQIDEWRREVRLWVDAS

SEQ ID NO: 3092 - protein, 120 aa, Artificial Sequence
  Description of Artificial Sequence: Synthetic polypeptide
MTRWLQIKDDYLELHAEGITARQAAERLGVSPRTIQRTRDRLGLSQPTTGGGKRPTPEQLEYARQLLEDGCSMTDAARSAGTTFNALKRRWPDKVWDPTTVGQYARQLDQLKRLELGRTK

SEQ ID NO: 3093 - protein, 120 aa, Artificial Sequence
  Description of Artificial Sequence: Synthetic polypeptide
MTTNVPTDREEVARRRETIAELTRAGLSAAEIALRLNITPRTVVRQRALAGVSKPTYPRLTEEQLATARQLIDEGAPYKEVARTIGCCQSTIAQRFPGRGWTRKQIDEWRREVRLWVDAS

SEQ ID NO: 3094 - protein, 120 aa, Artificial Sequence
  Description of Artificial Sequence: Synthetic polypeptide
MTTNVPTDREEVARRRETIAELTRAGLSAAEIAVRLNITPRTVVRQRAAAGVSKPTYPRLTEEQIETARRLIDEGAPYKEVARTIGCCQSTVAQRFPGRGWTRKQIDEWRRERRLWAAAS

SEQ ID NO: 3095 - protein, 120 aa, Artificial Sequence
  Description of Artificial Sequence: Synthetic polypeptide
MTTNVPIHREEVARRREAIAELTRAGLSAPEIAIRLNITARTVVRHRALAGVSKPTHPRLTEEQLATARRLIDEGAPYKEIARTIGCHESTVAQHFPGRGWTRKQIDEWRREVRLWVDAS

SEQ ID NO: 3096 - protein, 120 aa, Artificial Sequence
  Description of Artificial Sequence: Synthetic polypeptide
MKEIRSQQIRRRNNMLSELAELIVEAFVRNGLSREKAVSESEELVFQLHRRWAGITFVFPVKDELARKRLELHILQRYDGSNADKLVREFGVTEDWIYSVVRKHRRQRRTDQLGLFDPAE

SEQ ID NO: 3097 - protein, 119 aa, Artificial Sequence
  Description of Artificial Sequence: Synthetic polypeptide
MKEIRSQQIRRRNNMLSELAELIVEAFVRNGIPREKAVPESEEVAFQLHRRWAGLTFVFPVKDDLARKRLELHILQRYDGSNADKLVQEFGISEGLIYEIVRKHRRQRKDQMTLFDPAE

SEQ ID NO: 3098 - protein, 117 aa, Artificial Sequence
  Description of Artificial Sequence: Synthetic polypeptide
MTTWKKLTPEQIERIVSLTWDGWSIEQIATDIGCTSRTVTRVRGKHNITRGRALDPIPVEKLAVAARLLEEGASYTEAANTVGCSRSVLAAKFPGRGWDRKQCAEWRSIIRMERAIA

SEQ ID NO: 3099 - protein, 117 aa, Artificial Sequence
  Description of Artificial Sequence: Synthetic polypeptide
MKLNKKHQKAIELLFEGSLKRREIAEELNISEQTLYNWLKDEKFTNAYDEYVKMIMGKSSGKALHTMLKLMSARSEMVRFNAAKDILDRSGYTPVNKQQVEISETPLFVDDIGDDDG

SEQ ID NO: 3100 - protein, 117 aa, Artificial Sequence
  Description of Artificial Sequence: Synthetic polypeptide
MRRGAKLPEWVVERIVALSWNGWTTGDIAKEVGCSDRTVSRVRVRHGISRGEAHDPIPEHVLAQAARLLDDGASYTDAAATVGCSRTALRRKFPGRGWDRRQCAEWRVIARMERAIA

SEQ ID NO: 3101 - protein, 117 aa, Artificial Sequence
  Description of Artificial Sequence: Synthetic polypeptide
MRRGAKLPEWVVERIVALSWNGWTTGDIAKEVGCSDRTVSRVRVRHGISRGEAHNPIPEHVLAQAARLLDDGASYTDAAATVGCSRTALRRKFPGRGWDRRQCAEWRVIARMERAIA

SEQ ID NO: 3102 - protein, 117 aa, Artificial Sequence
  Description of Artificial Sequence: Synthetic polypeptide
MRRGAKLPEWVVERIVALSWNGWTIGDIAKEVGCSDRTVSRVRVRHGISRGEAHDPIPEHVLAQAARLLDDGASYTDAAATVGCSRTALRRKFPGRGWDRRQCAEWRVIARMERAIA

SEQ ID NO: 3103 - protein, 117 aa, Artificial Sequence
  Description of Artificial Sequence: Synthetic polypeptide
MRRGAKLPEWVVERIVALSWNGWTTGDIAKEVGCSDRTVSRVRVRHGISRGESHDPIPEHVLAQAARLLDDGASYTDAAATVGCSRTALRRKFPGRGWDRKQCAEWRSIIRMERAIA

SEQ ID NO: 3104 - protein, 117 aa, Artificial Sequence
  Description of Artificial Sequence: Synthetic polypeptide
MTTWKKLTPEQIERIVSLTWDGWSIEQIAADIGCTSRTVTRVRGKHNITRGRALDPIPVEKLAVAARLLEEGASYTEAANTVGCSRSVLAAKFPGRGWDRKQCAEWRSIIRMERAIA

SEQ ID NO: 3105 - protein, 116 aa, Artificial Sequence
  Description of Artificial Sequence: Synthetic polypeptide
MTPNIIIIVDNKMENTNALEINAAITLVTLRRNSVNFDTRKKTPQNNGNKIFRSRQPNKYQDVLTFIYQQHKYPDPHMYQNLSIILGLSIRQIQIWFQNRRARDSKKNRLSNKLGK

SEQ ID NO: 3106 - protein, 116 aa, Artificial Sequence
  Description of Artificial Sequence: Synthetic polypeptide
MTPNIIIIVDNKMENTNALEINAAITLVTLRRNSVNFDTRKKTPQNNGNKIFHNRRPNKYQDVLTFIYQQHKYPDPHMYQNLSIILGLSIRQIQIWFQNRRARDSKKNRLSNKLGK

SEQ ID NO: 3107 - protein, 116 aa, Artificial Sequence
  Description of Artificial Sequence: Synthetic polypeptide
MTPNIIIIVDNKMENTNALEINAAITLVTLRRNSVNFETHKKPRQNSENKIFRGRQPNKYQDVLTFIYQQYKYPDPHMYQNLSVILGLSIRQIQIWFQNRRARDSKKIRLNNKLEK

SEQ ID NO: 3108 - protein, 115 aa, Artificial Sequence
  Description of Artificial Sequence: Synthetic polypeptide
MTGRVLTPIEVEKVAWWTQLGWTAAQIADKLGCTTRTVSRARAKSGVAKPKPPALSAEVLAEAARMLADGASQNEVARTLGVGQSTISAHFRGQGWTREQSIEWVSFLRRYRGVA

SEQ ID NO: 3109 - protein, 115 aa, Artificial Sequence
  Description of Artificial Sequence: Synthetic polypeptide
MTGRVLTPVEVEKVAWLTRMGWTATQIAEQLGCHHRTVQRARAKTGVAKPKPPALSTEILEEAARMLADGASQNEVARTLGVGQATISAHFRGQGWTREQSIEWISFIRRYRGVA

SEQ ID NO: 3110 - protein, 115 aa, Artificial Sequence
  Description of Artificial Sequence: Synthetic polypeptide
MTGRVLTPVEVEKVAWLTRMGWTATQIAEQLGCHQRTVQRARAKTGVAKPKPPALSTEILEEAARMLADGASQNEVARTLGVGQATISAHFRGQGWTREQSIEWISFIRRYRGVA

SEQ ID NO: 3111 - protein, 115 aa, Artificial Sequence
  Description of Artificial Sequence: Synthetic polypeptide
MTGRVLTPVEVEKVAWLTRMGWTAKQIAEQLGCHHRTVQRARAKTGVAKPKPPALSTEILEEAARMLADGASQNEVARTLGVGQATISAHFRGQGWTREQSIEWISFIRRYRGVA

SEQ ID NO: 3112 - protein, 115 aa, Artificial Sequence
  Description of Artificial Sequence: Synthetic polypeptide
MTGRVLTPVEVEKVAWLTRMGWTAPQIAEQLGCHHRTVQRARAKTGVAKPKPPALSAEVLAEAARMLADGASQNEVARTLGVGQATISAHFRGQGWTREQSIEWISFIRRYRGVA

SEQ ID NO: 3113 - protein, 115 aa, Artificial Sequence
  Description of Artificial Sequence: Synthetic polypeptide
MTGRVLTPVEVEKVAWLTRMGWTAPQIAEQLGCHHRTVQRARAKTGVAKPKPPALSTEILEEAARMLADGASQNEVARTLGVGQATISAHFRGQGWTREQSIEWISFIRRYRGVA

SEQ ID NO: 3114 - protein, 114 aa, Artificial Sequence
  Description of Artificial Sequence: Synthetic polypeptide
MKFTDTPTTTLDELLNSTRGNISQAAKVIGINRGTLRNYIAKKDKVLLVQIDGKLVVFVADRRQGSHKKATQKSELVFMWSDEHKEDRWHIRSGDYYYGPYDTKGEAEFMLERN

SEQ ID NO: 3115 - protein, 113 aa, Artificial Sequence
  Description of Artificial Sequence: Synthetic polypeptide
MSKSIFSKEMDAFAIDILIRISMTLVESPIETEITEPVVKKLKGKREKIKNAGPLNEWFLSHLDYPYPNRAMRDELASRSGLTEKQVANWFGNARKRRPEYRKDAFVEDDDLW

SEQ ID NO: 3116 - protein, 112 aa, Artificial Sequence
  Description of Artificial Sequence: Synthetic polypeptide
MLVEELRDRGINFRSLTDSIDTSTPMGRFFFHVMGALAEMERELIVERTRAGLDAARAEGRIGGRRPKYQEETWQQMRRLLEKGIPRKQVAIIYDVAVSTLYKKFPASSFQS

SEQ ID NO: 3117 - protein, 112 aa, Artificial Sequence
  Description of Artificial Sequence: Synthetic polypeptide
MTIPSNTCHTASYFTTGLEIMTKERILDVAYSMALSDGFSCLKRDDIAAKAGVAQGTINHHFKYISHLKDDVMKIAVEKGDLKIIAEGIVSGNTVALSASHALKMEALQSLA

SEQ ID NO: 3118 - protein, 110 aa, Artificial Sequence
  Description of Artificial Sequence: Synthetic polypeptide
MDTFESELTLDMISEGMYRDIAEEIGVLNFLKVAKLVGGTTFYIPKAESLMRPVRDLHIKKEFNGYNHLELAQRYDVTERWVRQICGDGSIEGQVTIFDIGCENDMENTS

SEQ ID NO: 3119 - protein, 109 aa, Artificial Sequence
  Description of Artificial Sequence: Synthetic polypeptide
MSDVMWQPGVTIADLEKGAIKSALRFYGNKTDAAKSLGISVRTIDNKLKEYENQKIASEQAAKIAREKKLAEFRGLSVGTDNEKEVILPRGDAEQKTPNPQSDADEYKK

SEQ ID NO: 3120 - protein, 109 aa, Artificial Sequence
  Description of Artificial Sequence: Synthetic polypeptide
MEDLVKELTIDMVPDGDNRIIAETIGVENYYKLCSVVGGSTIYLQKPESVLRPVRDAHIKAEFNGYNHPELARKYGVTERWVRQLCGEGKLEGQMSLLDYGDEPENTTF

SEQ ID NO: 3121 - protein, 108 aa, Artificial Sequence
  Description of Artificial Sequence: Synthetic polypeptide
MAKKNYSEEFRRDAVELYRDTGGATVAGIAADLGVSHGSLTTWLRNAGIPIRRPAATAPGPGTGETPEQEAARLRAEVAHLRAEKTKLETERDILRSAAKYFAGETNW

SEQ ID NO: 3122 - protein, 108 aa, Artificial Sequence
  Description of Artificial Sequence: Synthetic polypeptide
MENLDILELNAAITLVSLRRNSVNIGIRKKNPQNKDKLNNFNYKCYPKKYQDILTFIYQQQKYPDPYMYKNLSITLGLTIHQIQTWFQNRRSRDNKKNILDNQPEINM

SEQ ID NO: 3123 - protein, 106 aa, Artificial Sequence
  Description of Artificial Sequence: Synthetic polypeptide
MGKRWTDKEDETLLLILSTSPKASYKEVARSMNRTPCSIRARYLKLRKRWGDLPPRGGVYTPEERVRVATLAKKHTLKEIAEIMNRSVHAIRCYCFRNKITLKVRR

SEQ ID NO: 3124 - protein, 104 aa, Artificial Sequence
  Description of Artificial Sequence: Synthetic polypeptide
MEKVIIIYHEHLNSFEESAVKILSGWKSERKNGIRFKMDGKKKCRLFTTCQLLILEEFYKANKYISMDKSIQLARTFGVTRKQINTWFQNKRAHDKRFESMNKN

SEQ ID NO: 3125 - protein, 104 aa, Artificial Sequence
  Description of Artificial Sequence: Synthetic polypeptide
MENPTTLEINAAIILVKLRRNSVNFDTRKKTPQNNENKIFRSRRPNKYQDVLTFIYQQQKYPDPHMYQNLSIILGLSIRQIQIWFQNRRARDSKKIRLNNKLEK

SEQ ID NO: 3126 - protein, 101 aa, Artificial Sequence
  Description of Artificial Sequence: Synthetic polypeptide
MDKKIIIIDRENFDSFEETAINILSKWKYERKNSIKPKMNYKFRKTRLFSPSQLIILNEFYKNNKYISIDKSIQLSRIFGVTRKQINTWFQNKRSYGKQQK

SEQ ID NO: 3127 - protein, 100 aa, Artificial Sequence
  Description of Artificial Sequence: Synthetic polypeptide
MKKRNFSAEFKRESAQLVVDQKYTVADAAKAMDVGLSTMTRWVKQLRDERQGKTPKASPITPEQIEIRELRKKLQRIEMENEILKKATALLMSDSLNSSR

SEQ ID NO: 3128 - protein, 100 aa, Artificial Sequence
  Description of Artificial Sequence: Synthetic polypeptide
MEKWMHKLKVEDLPEVYQNLAQVIGVDGVIKMTQEFGGTYMYIPKVDGLLRVARDQKIAEAHKNGDSIRKLAREFGISDSRVRTILNEYALDQNQLALFD

SEQ ID NO: 3129 - protein, 100 aa, Artificial Sequence
  Description of Artificial Sequence: Synthetic polypeptide
MNKIIIIYCNHFDSFEESVVQILSNLQCQRKNGVKMTKVKKFRRSRLFTTTQLQILEETYKGNKYISLNEKIGLSKNFGVTVKQISIWFANRRAYDARKN

SEQ ID NO: 3130 - protein, 99 aa, Artificial Sequence
  Description of Artificial Sequence: Synthetic polypeptide
MSKKHKTYTTEFKAEAIKLIEANQGNVSETARQLSISMQTLSNWNTKAKAGTLAGTKQYSPDLNALLEENKKLKQQLKIAEMEREFLKKAAAYFAKESQ

SEQ ID NO: 3131 - protein, 98 aa, Artificial Sequence
  Description of Artificial Sequence: Synthetic polypeptide
MSGKRYPEEFKIEAVKQVVDRGHSVSSVATRLGITTHSLYAWIKAYGPDSSTNKVQSDAQAEIRRLQKELKRVTDERDILNLQRRTSQSCPTEVRLYP

SEQ ID NO: 3132 - protein, 98 aa, Artificial Sequence
  Description of Artificial Sequence: Synthetic polypeptide
MELQDWRKEPRKKYSNEFKLRMVELASQPGACVAQIARENGVNDNVIFKWLRLWQNEGRVSRRLPVTTSSDTGVELLPVEITPDEQKEPVAAIAPSLY

SEQ ID NO: 3133 - protein, 97 aa, Artificial Sequence
  Description of Artificial Sequence: Synthetic polypeptide
MNATELLDQLREKVEALEEENTHLSNQLEIGRRSFGKAFMNGAVRGPNRPNRRKLTPREVHDIRTAYRNGMSQAELARTYEVNPSTISRTIGRVYHS

SEQ ID NO: 3134 - protein, 97 aa, Artificial Sequence
  Description of Artificial Sequence: Synthetic polypeptide
MTDRTRMKWTPELHAIFIDTCARLGGIYKAKPVEIMRLMNIPEISRDHVKSYLQKLRKEEDACNIALYGCSVKNTDATKKYNEICGLLNQAIKQMPE

SEQ ID NO: 3135 - protein, 96 aa, Artificial Sequence
  Description of Artificial Sequence: Synthetic polypeptide
MSRKIRRHFTDDFKQQIVDLYNAGRKRSSLIKEYELTPSTFDKWVRQAKTTGSFKSVDNLTDEQRKLIELRKRNKELEMQLDILKQAAVIMAQKGK

SEQ ID NO: 3136 - protein, 96 aa, Artificial Sequence
  Description of Artificial Sequence: Synthetic polypeptide
MSRKIRRHFTDDFKQQIVDLHNAGRKRSELIKEYDLTPSTFDKWVRQAKLTGSFKSVDNMTDEQRELIQLRKRNKELEMQLDILKQAAVIMVRKGK

SEQ ID NO: 3137 - protein, 95 aa, Artificial Sequence
  Description of Artificial Sequence: Synthetic polypeptide
MLQRGSQPGRPLNPREGVSMTSKRWNAPYFMDSVGRRRKLSDSAMKAICREYRDGETVRELAESYGVSTSLIRSVVYWTPRAKDEPKIELSEDQG

SEQ ID NO: 3138 - protein, 95 aa, Artificial Sequence
  Description of Artificial Sequence: Synthetic polypeptide
MPNQETLNRKKARKAEVARLLLAGMTQTAIAQIYGLSVSCISLYAKEMQIPCKADWYVSRNKILDLHRQGLRQSEIARKLALSRQRVSEIIKKFA

SEQ ID NO: 3139 - protein, 94 aa, Artificial Sequence
  Description of Artificial Sequence: Synthetic polypeptide
MNDTQTSVLNAAMKLSRIHGFQHIKRDDIAETANVSTGIVSYYYSIPEMRDAVMQEAVRVNDAVIICQGLAAKHPIAQGAPEALRREAVELLLK

SEQ ID NO: 3140 - protein, 93 aa, Artificial Sequence
  Description of Artificial Sequence: Synthetic polypeptide
MPRQRRTFTDDFKRQMVQLHENGKSRAAIINEYELSASALDRWIKQANQSGSFSEKDNRSLEENELIALRKENQRLKMEVDILKQAALIMGRK

SEQ ID NO: 3141 - protein, 93 aa, Artificial Sequence
  Description of Artificial Sequence: Synthetic polypeptide
MSRAINTHEPRTAKMEVSLVSELLIKFYGNKSHVAEHLKLQRTTLNKYLNEYGDIMMMKFGDQWVPLTQLSRRHNEPKVDIQEVIDAINKVRL

SEQ ID NO: 3142 - protein, 92 aa, Artificial Sequence
  Description of Artificial Sequence: Synthetic polypeptide
MGNKNTGKKYNEDFKKMIVDLYNSGSSAKDLSSEYGVSEVTIYAWVKKFSPIQTEDGSTVTADEIANMKKQMLRLQEENEILKKAMAIFAKK

SEQ ID NO: 3143 - protein, 91 aa, Artificial Sequence
  Description of Artificial Sequence: Synthetic polypeptide
MAETPTLLRVLDEIEDILAENEDLRHEVEKLRAESLHAKGAGRPNRKKLSAEEAKYIREMARNGISQAEIAWSFDVNRSTISRIVRGIYHR

SEQ ID NO: 3144 - protein, 91 aa, Artificial Sequence
  Description of Artificial Sequence: Synthetic polypeptide
MAETPTLLRVLDEIEDILAENEDLRHEVEKLRAQSLHAKGAGRPNRKKLSAEEAKYIREMARSGISQAEIAWSFDVNRSTISRIVRGIYHR

SEQ ID NO: 3145 - protein, 91 aa, Artificial Sequence
  Description of Artificial Sequence: Synthetic polypeptide
MAETPTLLRVLDEIEDILAENEDLRHEVEKLRAESLHAKGAGRPNRKKLSAEEAKYIREMARSGISQAEIAWSFDVNRSTISRIVRGVYHR

SEQ ID NO: 3146 - protein, 91 aa, Artificial Sequence
  Description of Artificial Sequence: Synthetic polypeptide
MADTSTLLKVLDEIEGLIEENEDLQHQVEKLRAESLHTKGAARPNRKKLTRDEVKYIREMARNGIPQAEIAWSFDVNRSTISRIVRGIYHR

SEQ ID NO: 3147 - protein, 91 aa, Artificial Sequence
  Description of Artificial Sequence: Synthetic polypeptide
MAETPNLLRVLDEIEDILAENEDLRHQVERLRAESLHAKGAGRPNRKKLTPEEAKYIREMARSGIPQAEIAWSFDVNRSTISRIVRGIYHR

SEQ ID NO: 3148 - protein, 91 aa, Artificial Sequence
  Description of Artificial Sequence: Synthetic polypeptide
MAETPTLLRVLDEIEDILAENEDLRLEVEKLRAESLHAKGAGRPNRKKLSAEEAKYIREMARSGISQAEIAWSFDVNRSTISRIVRGIYHR

SEQ ID NO: 3149 - protein, 91 aa, Artificial Sequence
  Description of Artificial Sequence: Synthetic polypeptide
MSTFKRYDEEFKQSLVNLYQTGKTQSELCKDYGVSASALAKWIKQYSQVRLEDNSVLTAKQIQELQKRNAQLEEENLILKKASAIFMQNLK

SEQ ID NO: 3150 - protein, 90 aa, Artificial Sequence
  Description of Artificial Sequence: Synthetic polypeptide
MREGRLSVVYLKEEEKQKRTIDAVKYMMKHNLTMNLAGRRYGLPRSTLHRFIHKHLEGWDKELYDEVIKFIKRRRKQIALEASYSYHGRP

SEQ ID NO: 3151 - protein, 87 aa, Artificial Sequence
  Description of Artificial Sequence: Synthetic polypeptide
MRSLYSTCDVKIPIQKWKNTNKKKACGKKISGHSLDVLLRWYTAGFTPNAEQRFSLSQDLDLTPIQIKNWFYNKKRNEKKLKNNTLE

SEQ ID NO: 3152 - protein, 87 aa, Artificial Sequence
  Description of Artificial Sequence: Synthetic polypeptide
MRSLYSTCDVKIPIQKWKNTNKKKACGKKISGHSLEVLLRWYTAGFTPNAEQRFSLSQDLDLTPIQIKNWFYNKKRNEKKLKYNTLE

SEQ ID NO: 3153 - protein, 87 aa, Artificial Sequence
  Description of Artificial Sequence: Synthetic polypeptide
MADVREVADLLNRLNVIVRELVSENSQLKAAAAGKGNRPKLTDSEVSSVRELYRAGLSQRQIAEAYDVNPATISRIVRGIYHTKGGS

SEQ ID NO: 3154 - protein, 87 aa, Artificial Sequence
  Description of Artificial Sequence: Synthetic polypeptide
MADVREVADLLNRLNTIVRELVSENSQLKAEAEGKASRPKLSPGEVSSIRELYRAGLSQKAIADTYDVNPATVSRIVRGIYHAKGGS

SEQ ID NO: 3155 - protein, 87 aa, Artificial Sequence
  Description of Artificial Sequence: Synthetic polypeptide
MADVREVADLLNRLNVIVRELVSENSQLKAAAAGKGNRPKLTDSEVSSVRELYRAGLSQRQIAEAYDVNPATVSRIVRGIYHTKGGS

SEQ ID NO: 3156 - protein, 87 aa, Artificial Sequence
  Description of Artificial Sequence: Synthetic polypeptide
MADVREVADLLNRLSTIVRELVSENSRLKAAVEGKSNRPKLTDNEVASIRELYRAGLSQKAIAEVYDVNPATISRLVRGIYHNKGGS

SEQ ID NO: 3157 - protein, 87 aa, Artificial Sequence
  Description of Artificial Sequence: Synthetic polypeptide
MADVREVADLLNRLNGIVRELVSENSQLKAAVGGNSNRPKLTDNEVASIRELYRAGLSQKAIAEVYDVNPATISRLVRGIYHNKGGS

SEQ ID NO: 3158 - protein, 87 aa, Artificial Sequence
  Description of Artificial Sequence: Synthetic polypeptide
MADVREVADLLNRLSTIVRELVSENSRLKAAVEGNSNRPKLTDNEVASIRELYRAGLSQKAIAEVYDVNPATISRLVRGIYHNKGGS

SEQ ID NO: 3159 - protein, 87 aa, Artificial Sequence
  Description of Artificial Sequence: Synthetic polypeptide
MADVREVADLLNRLSTIVRELVSENSQLKAAVEGKSNRPKLTDNEVASIRELYRAGLSQKAIAEVYDVNPATISRLVRGIYHNKGGS

SEQ ID NO: 3160 - protein, 87 aa, Artificial Sequence
  Description of Artificial Sequence: Synthetic polypeptide
MAEVREVADLLNRLNVIVRELVSENSQLKAAAAGKGNRPKLTDNEVSSVRELYRAGLSQRQIAEAYDVNPATISRIVRGIYHTKGGS

SEQ ID NO: 3161 - protein, 86 aa, Artificial Sequence
  Description of Artificial Sequence: Synthetic polypeptide
MEVDYVTTKEACRITGFKAPTLRGWSNVGKVKTTRTLANQRLYDRQSLLSFIGGVNDGIEKEKIIYCRVSSKKQSEHFEHQIEFCK

SEQ ID NO: 3162 - protein, 84 aa, Artificial Sequence
  Description of Artificial Sequence: Synthetic polypeptide
MREVADLLNRLNTIVRELVSENSQLKAEAEGKASRPKLSPGEVSSIRELYRAGLSQKAIADTYDVNPATVSRIVRGIYHAKGGS

SEQ ID NO: 3163 - protein, 84 aa, Artificial Sequence
  Description of Artificial Sequence: Synthetic polypeptide
MGRFFFHIMGALAEMERELIVERTRAGLAAAREQGRIGGRRPKLTPEQWAQAGRLIGAGVPRQQVAIIYDVGLSTLYRKFPARC

SEQ ID NO: 3164 - protein, 84 aa, Artificial Sequence
  Description of Artificial Sequence: Synthetic polypeptide
MKSREFKSIVFGCEPQYEIEGLKTSQITVSTLQDLLVHTRGNQTKAAELLGAHRQTIKTMLQQNRPNVILIENVGDEYFYKLMK

SEQ ID NO: 3165 - protein, 84 aa, Artificial Sequence
  Description of Artificial Sequence: Synthetic polypeptide
MKNLNNPLSTFIKLEKTQSELCKDYGVSASALAKWIKQYSQVRLEDNSVLTAKQIQELQKRNAQLEEENLILKKASAIFMQNLK

SEQ ID NO: 3166 - protein, 83 aa, Artificial Sequence
  Description of Artificial Sequence: Synthetic polypeptide
MTSRYDKEFKQNIINLYKQGESAAQMAREYGIGYSTVHKWIQGQAKTQSGKSPDEIKAMEKRLASLSEENEILKKALGFLAQK

SEQ ID NO: 3167 - protein, 83 aa, Artificial Sequence
  Description of Artificial Sequence: Synthetic polypeptide
MADVREVADLLNRLNVIVRELVSENSQLKAAAAGKGNRPKLSDNEVSSVRELYRAGLSQRQIAEAYDVNPATISRIVRGIYHT

SEQ ID NO: 3168 - protein, 83 aa, Artificial Sequence
  Description of Artificial Sequence: Synthetic polypeptide
MADVREVADLLNRLNTIVRELVSENSQLKAAAAGKGNRPKLTDSEVSSVRELYRAGLSQRQIAEAYDVNPATISRIVRGIYHT

SEQ ID NO: 3169 - protein, 83 aa, Artificial Sequence
  Description of Artificial Sequence: Synthetic polypeptide
MADVREVSDLLNRLNVIVRELVSENSQLKAAAVGKGNRPKLTANEVSSVRELYRAGLSQRQIAEAYDVNPATISRIVRGIYHT

SEQ ID NO: 3170 - protein, 83 aa, Artificial Sequence
  Description of Artificial Sequence: Synthetic polypeptide
MSTFKRYDEEFKQSLVNLYQTGKTQSELCKDYGVSASALAKWIKQYSQVRLEDNSVLTAKQIQELQKRNAQLEEENLESVTLN

SEQ ID NO: 3171 - protein, 80 aa, Artificial Sequence
  Description of Artificial Sequence: Synthetic polypeptide
MRSLYSTCDVKIPIQKWYNINKKKACGKKISGHSLDVLLRWYTAGFTPNAEQRFSLSQDLDLTPIQIKNWFYNKKRNEKN

SEQ ID NO: 3172 - protein, 77 aa, Artificial Sequence
  Description of Artificial Sequence: Synthetic polypeptide
MKLKRKVRRGEMTKTSIDQEIDEAIAKGGSFYKIRRRFEKAILERALIKTRGNQTEAAKMLGISRSGLGGILKRVGR

SEQ ID NO: 3173 - protein, 76 aa, Artificial Sequence
  Description of Artificial Sequence: Synthetic polypeptide
MFGALGEFERNLMIERVNAGIESAKAKGRVGGRPKSMTPEQIKMARDLVDAGHNKTDIAEQMGVSRATLYRNLETA

SEQ ID NO: 3174 - protein, 74 aa, Artificial Sequence
  Description of Artificial Sequence: Synthetic polypeptide
MAIIRAVCSVHFRAGLAAARAQGRVGGRRPKLTPEQWEQAGRLLAAGETRHRVGLLFDVSISTLYKKFPVNQSR

SEQ ID NO: 3175 - protein, 74 aa, Artificial Sequence
  Description of Artificial Sequence: Synthetic polypeptide
MLIGYVRVSTNEQNTALQRNALESAGCELIFEDKASGKKAERPGLKKVLRMLSRGDTLVVWALDHFAGSSVTWL

SEQ ID NO: 3176 - protein, 74 aa, Artificial Sequence
  Description of Artificial Sequence: Synthetic polypeptide
MKFTDTPTTTLDEVLISTRGNISQAAKAIGINRGTLRNYIAKKDKVLLVQVDGKLVPFVADRRQGSHKKESNND

SEQ ID NO: 3177 - protein, 74 aa, Artificial Sequence
  Description of Artificial Sequence: Synthetic polypeptide
MKFTDTPTTTLDELLISTRGNISHAATKIGITRTTLRNYIAKKDKVLLVQVDGKLVPFVADRRQGSHKKESNNG

SEQ ID NO: 3178 - protein, 74 aa, Artificial Sequence
  Description of Artificial Sequence: Synthetic polypeptide
MKFTDTPTTTLDELLIKHRGNISHAALELGINRTTLRNYIAKKDKVLLVQIDGKLVPFVADRRQGAHKKESNNG

SEQ ID NO: 3179 - protein, 74 aa, Artificial Sequence
  Description of Artificial Sequence: Synthetic polypeptide
MKFTDTPTTTLDEVLISKRGNISQAAKAIGINRGTLRNYIAKKDKVLLVQVDGKLVPFVADRRQGAHKKESNNG

SEQ ID NO: 3180 - protein, 74 aa, Artificial Sequence
  Description of Artificial Sequence: Synthetic polypeptide
MKFTDTPTTTLDELLEFTHGNKSHAATKIGITRTTLRNYIAKKDKVLLVQVDGKLVPFVADRRQGAHKKELNNG

SEQ ID NO: 3181 - protein, 74 aa, Artificial Sequence
  Description of Artificial Sequence: Synthetic polypeptide
MKFTDTPTTTLDEVLISTRGNKSHAATKIGITRTTLRNYIAKKDKVLLVQVDGKLVPFVADRRQGAHKKESNNG

SEQ ID NO: 3182 - protein, 73 aa, Artificial Sequence
  Description of Artificial Sequence: Synthetic polypeptide
MFLLYCRGTGEIGGRRPKLSPEQWAQAGRLIGAGIPRQQVAIIYDVGLSIHGLYWILLSANRKGVKKRDYRAN

SEQ ID NO: 3183 - protein, 72 aa, Artificial Sequence
  Description of Artificial Sequence: Synthetic polypeptide
MQTQNNVRTTNIEVATIKDAMAFNYGNQRGMAKHLGINRGTLAKKLASNRDYYVRVHRDGWNNITHLEWLNK

SEQ ID NO: 3184 - protein, 72 aa, Artificial Sequence
  Description of Artificial Sequence: Synthetic polypeptide
MKFTDTPTTTIDEVLISTRGNVTHAAKKIGVTRDTLRRYIQKKDKVLLVEVDGKLMAFVADRRQGHHKKEGK

SEQ ID NO: 3185 - protein, 71 aa, Artificial Sequence
  Description of Artificial Sequence: Synthetic polypeptide
MKFTDTKTTTIDEVLINTRGNITHAAKKIGVTRDTLRRYIQKKDKVLLVEIDGKLVVFVADRRQGHHKKAN

SEQ ID NO: 3186 - protein, 71 aa, Artificial Sequence
  Description of Artificial Sequence: Synthetic polypeptide
MKFTDTPTTTLDELLIKHRGNISHAALELGINRTTLRNYNKKKDKVLLVQVDGKLVPFVADRRQGAHKKAS

SEQ ID NO: 3187 - protein, 71 aa, Artificial Sequence
  Description of Artificial Sequence: Synthetic polypeptide
MKFTDTPTTTLDEVLISTRGNISQAAKAIGINRGTLRNYIAKKDKVLLVQVDGKLVVFVADRRQGAHKKAN

SEQ ID NO: 3188 - protein, 71 aa, Artificial Sequence
  Description of Artificial Sequence: Synthetic polypeptide
MKFTDTPTTTIEELLIKHRGNISHAALELGINRTTLRNYNKKKDKVLLVQVDGKLVPFVADRRQGAHKKAS

SEQ ID NO: 3189 - protein, 71 aa, Artificial Sequence
  Description of Artificial Sequence: Synthetic polypeptide
MKFTDTPTTTIDEVLISTRGNISHAAKKIGITRTTLRNYIAKKDKVLLVQIDGKLVPFVADRRQGSHKKGN

SEQ ID NO: 3190 - protein, 71 aa, Artificial Sequence
  Description of Artificial Sequence: Synthetic polypeptide
MKFTDTPTTTIDEVLISTRGNISHAAKKIGVTRDTLRRYIQKKDRVFLVEVDGKLMAFVADRRQGHHKKGN

SEQ ID NO: 3191 - protein, 71 aa, Artificial Sequence
  Description of Artificial Sequence: Synthetic polypeptide
MKFTDTPTTTLDELLEFTRGNKSHAATKIGITRTTLRNYIAKKDKVLLVQIDGKLVPFVADRRQGAHKKAS

SEQ ID NO: 3192 - protein, 70 aa, Artificial Sequence
  Description of Artificial Sequence: Synthetic polypeptide
MRELVSENSQLKAEAEGKASRPKLSPGEVSSIRELYRAGLSQKAIADTYDVNPATVSRIVRGIYHAKGGS

SEQ ID NO: 3193 - protein, 70 aa, Artificial Sequence
  Description of Artificial Sequence: Synthetic polypeptide
MKFTDTPTTTLDELLNSTRGNISQAAKAIGINRGTLRNYIAKKDKVLLVQVDGKLVVFVADRRQGHFKKA

SEQ ID NO: 3194 - protein, 70 aa, Artificial Sequence
  Description of Artificial Sequence: Synthetic polypeptide
MKFTDTPTTTLDEVLISTRGNISQAAKAIGINRGTLRNYIAKKDKVLLVQVDGKLVVFVADRRQGSHKKA

SEQ ID NO: 3195 - protein, 68 aa, Artificial Sequence
  Description of Artificial Sequence: Synthetic polypeptide
MLKTKSIQVCTVADVLVKTRGNQLQAAKILGIHRGSLFNWIKAGIEKEKLVRVEIHGDFEEKLTVINH

SEQ ID NO: 3196 - protein, 68 aa, Artificial Sequence
  Description of Artificial Sequence: Synthetic polypeptide
MLKTKPTQVCTVADVLVKTRGNQLQAAKMLGIHRGSLFNWIKAGIEKEKLVRVEIHGDFEEKLTVINH

SEQ ID NO: 3197 - protein, 68 aa, Artificial Sequence
  Description of Artificial Sequence: Synthetic polypeptide
MTTTAPAATTLTADQTTTARTLLEDGASYREVARTLGVPRHRVMRALPGYGWTYRDAGTFTASMRWAR

SEQ ID NO: 3198 - protein, 67 aa, Artificial Sequence
  Description of Artificial Sequence: Synthetic polypeptide
MTHTIKTIPDMLIETYGNQTEVARRLSCHRNTVRRYLYDKEARYHAIVNGVLMIHQGGRGIYDRNQH

SEQ ID NO: 3199 - protein, 67 aa, Artificial Sequence
  Description of Artificial Sequence: Synthetic polypeptide
MTHTVKTIPDMLIETYGNQTEVARRLSCHRNTVRRYLYDKEARHHAIVNGVLMIHQGGRGVYDRNQH

SEQ ID NO: 3200 - protein, 67 aa, Artificial Sequence
  Description of Artificial Sequence: Synthetic polypeptide
MTHTVKTIPDMLIETYGNQTEVARRLSCHRNTVRRYLYDKEARYHAIVNGVLMIHQGGRGIYDRNQH

SEQ ID NO: 3201 - protein, 67 aa, Artificial Sequence
  Description of Artificial Sequence: Synthetic polypeptide
MTHTIKTIPDMLIETYGNQTEVARRLSCHRNTVRRYLYDKEARHHAIVNGVLMIHQGGRGIYDRNQH

SEQ ID NO: 3202 - protein, 67 aa, Artificial Sequence
  Description of Artificial Sequence: Synthetic polypeptide
MKATVHTIYELLPSTRGNITELARVLGCDRATIYKYMHDINGEFHSVVNGKLFVKPGLKGRHTRDKR

SEQ ID NO: 3203 - protein, 67 aa, Artificial Sequence
  Description of Artificial Sequence: Synthetic polypeptide
MTREYATWPPIRAGQPRLEFSSAVWWSWPALREALAEFERSMIRERQREGIALAKARGVCTDLICPV

SEQ ID NO: 3204 - protein, 67 aa, Artificial Sequence
  Description of Artificial Sequence: Synthetic polypeptide
MTHTVKTIPDMLIETYGNQTEVARRLSCHRNTVRRYLYDKEARYHAIVNGVLMIHQGGRGVYDRNQH

SEQ ID NO: 3205 - protein, 67 aa, Artificial Sequence
  Description of Artificial Sequence: Synthetic polypeptide
MTHTIKTIPDVLIETYGNQTEVARRLSCHRNTVRRYLYDKEARHHAIVNGVLMIHQGGRGIYDRNQH

SEQ ID NO: 3206 - protein, 66 aa, Artificial Sequence
  Description of Artificial Sequence: Synthetic polypeptide
MTKTSIDQEIDEAIAKGGSFYKIRSRFEKAILERVLIKTRGNQTEAAKMLGISRSGLGGILKRVSR

SEQ ID NO: 3207 - protein, 66 aa, Artificial Sequence
  Description of Artificial Sequence: Synthetic polypeptide
MTKTPIDQEIDEAIANGESFYKIRKRFEKAILERALIKTRGSQTEAAKMLGISRTGLGGILKRVCR

SEQ ID NO: 3208 - protein, 65 aa, Artificial Sequence
  Description of Artificial Sequence: Synthetic polypeptide
MNRSIEQEIDEAIANGESFYKIRKRFEKAILERALIKTRGSQTEAAKMLGISRTGLSGILKRVSR

SEQ ID NO: 3209 - protein, 65 aa, Artificial Sequence
  Description of Artificial Sequence: Synthetic polypeptide
MKTTVDQEIDEAIANGESFYKIRSRVEKAILERALIKTRGNQTEAAKMLGISRTGLGGILKRVSR

SEQ ID NO: 3210 - protein, 62 aa, Artificial Sequence
  Description of Artificial Sequence: Synthetic polypeptide
MTHTIHELLPTTRGNITELARILDCDRGTLRKYIKDKKGEFHVIVNGKLFVKPGFKGRIKHD

SEQ ID NO: 3211 - protein, 61 aa, Artificial Sequence
  Description of Artificial Sequence: Synthetic polypeptide
MLTISDLLVMTRGNQSEVARMLKISRCTLTRYMKLKVEHMVLERNGQYNLFTNISEQYGNG

SEQ ID NO: 3212 - protein, 60 aa, Artificial Sequence
  Description of Artificial Sequence: Synthetic polypeptide
MRDFNLKEETRKFQKSLIEQALIFNSSDVTKTSKSLGISRASLYRKMKELKVFTEEKENN

SEQ ID NO: 3213 - protein, 58 aa, Artificial Sequence
  Description of Artificial Sequence: Synthetic polypeptide
MKKWTKEEEQELVRLTENAWDWNFPGYDWVRTHLEIDYPNGRTVNAIRQKYYSILNCR

SEQ ID NO: 3214 - protein, 56 aa, Artificial Sequence
  Description of Artificial Sequence: Synthetic polypeptide
MHAKGAGRPNRKKLSAEEAKYIREMARNGISQAEIAWSFDVNRSTISRIVRGIYHR

SEQ ID NO: 3215 - protein, 51 aa, Artificial Sequence
  Description of Artificial Sequence: Synthetic polypeptide
MNGYPKRIRNQILALHEQGMAINEISRRLRGLIDRDTVKRWVAEHKNSKGS

SEQ ID NO: 3216 - protein, 40 aa, Artificial Sequence
  Description of Artificial Sequence: Synthetic polypeptide
MTTEVVERCRRMLGTGATRQQVADVTGVDVKTIYKYLPAT

SEQ ID NO: 3217 - protein, 37 aa, Artificial Sequence
  Description of Artificial Sequence: Synthetic polypeptide
MYSKMKELRAVGMTYKQIAQSLNVSVATVFKHCKAGD

SEQ ID NO: 3218 - protein, 907 aa, Artificial Sequence
  Description of Artificial Sequence: Synthetic polypeptide
MNGLSKITASHRSRTAAIYLRQSTYVQVRDNTESTLRQYDLVERAVELGWAREDVLVIDADLGRSAKFGSERLGFRDLVAQVCLGEVGAVFGLEVSRLARSSADFARLLELARLTDALLVDADGVYDLADINDRLLLGLKGSMSEAELHILAGRLHGAKRAAAGRGELRFPLPVGYVYDDEGCCVIDPDQEVQAAIADVFAVFQEQGSAFKVVGAYVGRRFPLRAYGGIWAGQLRWGKLTHSRVLGLLRNPCYAGTYVYGRYLTRRTVRPDGSVHTGIVLRPRAQWPIVLHGHHEGYISWDDYLANEAKLKANCTHDGARPPREGLALCQGIMLCGSCGRPMTTRYYEYQQAAYGCSSSRADHEATATCRSIRADAVDEPVARLLLSALSPGQIELALAAANEVTVRHSRSHRAAELAVERARFDAQRAERAFNAVEPENRLVARTLESRWEARLVALAEAEAALAQVREARPALPDRDGLRALAAGLPRLWWADTTKDRDRKRLLRTLISDVTLLPETDRARARIGVRWHTGATDVLDIRRPHTSAQVRKTPAAARELIAQLSPTRSNAEITAELARAGLMTGTGQCYTVAAVKWVRYTYQIPAPSPFQDGEVSVDQAAQILGISANAVYYWLTHGRLSGRKEPGGRWCIPWNEQVEAACRSQIDASGHLIPHDLVPREIRPGEITVQQAADRLGVVCHVLYYWIRLGRLTARKGPDTRWCIPWDQETETACRNWLARPEQFVPHGTGSRPLSEGHDELSIQQAAARLGALPAAIAYQIRAGRLTARHLRNGRVAIAWDDDIEADLRWQLAQPKHPGPTGPGSHPLPAEISENGEISVQDAAARLGIRAGTVYHWIYQGDLTAHRAAGGRVSIPWPPGVEAACHQRALNCRKFTPQSQMSTAGGAV

SEQ ID NO: 3219 - protein, 821 aa, Artificial Sequence
  Description of Artificial Sequence: Synthetic polypeptide
MDPRRPRSPRGAARPSPRPIEMVPRFHFRVPVRIRPPGQDRATARLRRRPRPCPDRPDRARFDTFSRTTMDEPTPDGDAVRPRPAAATDTDRLIDELVVAAHRRTPQEQCGQVGAIYARYSTKAQGSVGDQVRSVLEAAARLKIHVPREFVFYDEAVSGSRNRRPGLDRLRATLARRGAVQAVLVFATNRLGRTAYHAMQIVHEEMVGRDIRCVFTSNNIDTADGHTWQLLLQAYSMVDQMVVASAAAHIHAAHEAMFDQGLVHGAVTYGYRGREVGEGRGVRKGRPLREYEIDPEAAPWILRAFEWYAREGLSIGEVVRRLNAEPRAPRNPRLLAGWDHAAVRRMLGNPRYRGHWMYGETKAVCHPGKASTAHVRRDAPLKSARLEHLRIVPEDLWLRARARLAEGDRRAAGRKPRDGDHRSRPRALAGLFHCGAHGRRMQAGGGHGKMLICKDCMGTPRERRSLCSILNRRLALKLTCEALALRIRRDDGLATAIVAASRSAAASLQSPDPAHLVGLRTRIEALTRRIGFVMDNPGAEPRDVLEAKAKLQQLRRERSALESDLGRIEADAARAVEVPDEGAVREMLSRLGATLDEAAGEGDAPEDRAVREVVDALTGGRVDLFQEGGREPKRGWLRGSFRFDLERLARLAGFPAIPAPPDGPDPRELVRIDYREPAPCEAHATAVKALYDEGVLVKEIAARLGISRNLAAKALAWWHRSRDLEPPDGRSRRSSLPVDARSLTPPLYVRLADEALRLSEQGLLYEEVAARLGCDRNTAAKAIKRASELRGTPAQDGRSRRKTLDRYRRGRDADAAPPGTA

SEQ ID NO: 3220 - protein, 801 aa, Artificial Sequence
  Description of Artificial Sequence: Synthetic polypeptide
MRVALYARVSTSHQVEHQTIEQQFERLTAHVRAHADAGWHVDPAHVFRDDGYSGAALSRPGLDRLRDAIKAREVDRVLVTAPDRLARNYVHQMVLLEEWSRSGCIAAFLDRPMSDDPHDHLLLQIRGAVAEYERTLIAERMRRGRLAKLRAGVLLPWTYAPYGYRLSPDRPRDPTGVVTEPAEAAVVAELFALYREPGASLMQLALHLDRRGIPTPSRTPRWSTPTIRGILRNPTYTGQIYAQRTQYRAPTQRRSATHPIGRPHGSAVPQPSDTWLLVGQVPAVVSREHFDLVQAKLATNRSFARRNNTAHSYLLRALVSCGCCGLACTGRTVNGRNRYYLCNGKGHTTFSHRATRCPARYTPAGQLDDVVWADLCALMSEPEPLAVAVERAHGGAWLPQDLLARRETLRRGREHLHQQLERLTDAYLRAVIPLDEYERRRRDLEQRVQALSAQEDQVRDETARRQHLAGVTASLEAFRVRVQGGLAQADFEQRRQLVMLLVDRVVVTGAEVEIRYVLPTSPDSEHVRFCQLRKDYFDDPTAWEQHEADLVGRLAHDFDGDDRGGRRSVAGIASIEGLGDEREASARQAQYQNGSVPVLHVGRLRIEDKRTPVRVDQRLALAAFDLLTGVVAARPAALHRFDGLAIEHCCRRRGFPSDTLAINHDEVVVDLCEQPCVAPAAEVAEGGRARWQILGDHPPCDAAAQNVEDRVQDLPRRPDRRPPARLRPRHQRLDHRPLGVGQVGFIAKAHAAMLPPGGRGPHGVSKSGFSTLLEASPSRPLNPASDPYRTGSQSHHTIYGK

SEQ ID NO: 3221 - protein, 748 aa, Artificial Sequence
  Description of Artificial Sequence: Synthetic polypeptide
MTAHSKVEGRHLRLLALVYIRQSTPQQVQNNQESTRRQYELAQRARQMGWPDTAVRVIDEDLGTSGARSQNRTGFQRLVASIGMGEVGIVLVTEVSRLSRLSSDWHRVIELCAVFRTLIADEDGVYDAQNPNDRLLLGVKGTLFAAELHILRARMHGALLNKAQRGELAVALPVGYRRRADGVVEQDPDEAVRLAVDTVFERFSALGNARGVLRHFIDNGLRLPRIVQAGPEKGQAVWVRPAYSMIHRMLSNPAYAGAFVYGRVRRDVAAGDPPTAVERRLPIEEWAIVVQGVYPAFISYDRFLANRQKLKANRYNFAVKERGAARAGAALLQGLVQCGRCGHQMGVSYGRQQPRYQCRQAQTHYAEPMCQSFVAGDIDAIVVEAFLQAMRPAELDATLAALRNLEQERQTVDRQWQLRLERTRYEARLAQRQYDAVDPDNRLVARELERRWEAALAEAEMLQQEYERLLAAELRPLDAVEAEDVRWLASDLPALWKADTTRPIDRKRLLRLAVAAVTVTVRPGRSGADIQVLWSGGAKTMHRASSPGHGRHLRTDAGVLGTIRDLAGRMPDHQVAAALTAQGLLSRHGKTWTRSRVASMRRQHAIPTACPAQTRGLTMRADGFVPARVAAQQLGITLAALRVWAHRGVLICDQSSDAAKIWVRLDPGDRERLGGEADTAGMERVRDLAQTSGSSISAVWERVRRKEFSAYRTRRGHNQWDWRLAPLIPALGATPGSQSSSAARTTAQ

SEQ ID NO: 3222 - protein, 741 aa, Artificial Sequence
  Description of Artificial Sequence: Synthetic polypeptide
MIEHSKIATGHLARQAVVSLRQSSASQVENNRESTDRKYALSGRARELGWPAERIVVIDEDLGLSGSGSVMRSGFARLTSEVALARVGIVLGLEVSRLARNNADWHRLIELAGLTDTLIGDADGIYHPALFNDRLLLGLKGAMSEAELHVLRARLDGGIRNKAARGELRRGLPVGFIWGEDDGEILIHPDEAVSHVIRTIFARFAELGSARRVWLWLRANDIKFPLRLGEHQDLRWSEASYHGVHAVLANPVYAGAYVYGKNRHETVLDETGARRKRVRKLPRDEWQVLIKDHHQGYIDWPSFEVNQQRMATNTQPRPHSDASRHSAGAVREGGALLQGIAHCGHCGRRLRTHYRGRNAAPGYHCAGKIIVDGRGVYCLNIGGVQIDEAVAAAFLEALEPARLTATIEAAERLESDREATLKQSRLDVERAQFAVNRAKRRYRAVDPDNRLVARSLEREWEEALRALEVAKTELARREEARPRLLSSQERANLLTLGVDLVSVWHAPSTTARDHKELLRTLIEEVTLHVDRDNACARLTLRWKGGAIGQLEVALPRSRPATVRTDEDTLTLVRRLAPHYPDAVIAGVLNRQGRQTARGHRFDANRVGNLRRHWNIPACKARPQTADGDILTIRQAASVLGVAPSTLHRHLNDGLIRGEQITPGAPWRIRLTDELKARFLTTPDDGFEPIRDALDTLGLSRQALLQRVRHGELESVYVIRGQRKGLWIKTIDQNPTLFEHML

SEQ ID NO: 3223 - protein, 738 aa, Artificial Sequence
  Description of Artificial Sequence: Synthetic polypeptide
MKRLNGLFDEAARDRRALAAELGARPPRMPGAGELKGRSPVLLSLPDVWLDRHGGAAEIVHTPTAGRAAIYTRFSTSAQTQTSTERQVELCRTYCVRLGLEHDPDRDVYSDEARSGRNIWGRQSLQQMLDAVLAGQYRYVVIEDGDRLSRDLSDLSWLAKTLQEAGVELHSTTRGKLDSRHVVMDGLLSSETLAQMVVRADYSRRRRAQEGLCMGGVAFGYDRVPGQAGKCVVNPAQAEHVRWIYETYLAGTLSPTQIARDLQRRGVDGPSGTCSWNDGTVRRILSNPRYCGLLIYGRRQTWRNPADRTWCQRVTDPQTWIVAEVEDWVIVDRETWNRVQVRMKERSLLAPGGLAGTRAPARKVENLLTKRIKCPFCEEGFYAVDHSSKGESRIRCNRYAQERGCTNSRSYLMHMVEAAVVRCVGDALADEAGLAAFADAQARALQKRERAAVDERPRLERRIAAAEGELHATFKVPEGIGEAEWGRTVAGLQAKLARELGALRHELSNLGSAPPQSVSIDPDRLGDLRQAFSELAATAPFRPVDEAGQRLKAAFRDFVTGVILHPGEEPGEFRIEVTTQMGELVPGVQRSMNLSAHHRLPPTGFRGDPDRVMRAREMAERREFALTDAEWELVEPLVPPETGRGRWARDCIPARTLVDIALYRIEARVPWRQIPDTFGEPVMVLAAMRRLAFCGAWDRVLACLKASSPERFEGKDPHDVAVLGLLTRRSLEARRSPI

SEQ ID NO: 3224 - protein, 737 aa, Artificial Sequence
  Description of Artificial Sequence: Synthetic polypeptide
MSDTANKIGTSHLQRAAFVYIRQSSASQVEHNRESTQRQYALAQRATALGWSQQQVNVVDDDLGLSGASTARRGGFARMTAEVALGHVGIILGLEVSRLARNNADWYRLLDLCTMTDTLIGDADGVYNPAHFNDRLLLGLKGTMSEAELHILRARLDGGIRNKAARGELRRGLPTGLVWGEADGEVRLHPDEAVVSALHAVFARFNEFGSARRVWLWLRSENLSFPLQLNRNEQIRWVAPTYNAIYNVLTNPVYAGAYCYGKTRTERYVDKHGTLKTRLRRLPQSQWAVLIREHHEGYIDWATYEANQMRLAANTKPRPHETGGAVREGAALLQGLATCGHCGRSLKTHYRGTNQTPGYHCSNKGIENGRGVYCLNIGGLQIDTAVALAFLHAVEPAGLEAAVQAAERLEADHDAALAQWRLTVERTHYEALRAERRYRAVDPENRLVARGLETQWETQLRELEQAQAELSRREQLRPRTLNPEQRKSLLVLGKDLKQLWDAPNLTVRDRKQLLRTLLEEVSITVQREHYQAHLKLRWRGGKLTECDIALPRSRPATIRTDEDTIALVRRLAEHHPDAIIAGILNAQGRVTARGLRFNQSLVGNLRRHWHIPCFELPAVLPDGELLSIRQAARALGTAPSTLHRWVNDGFIAAEQTTPGAPWRIRITDSLRRRFVEHSPEGYVVMQEATKLLGVSRQTVSQRVKRGELDAVLVCHGRRKGLRIKAVNDQPDLFEHSS

SEQ ID NO: 3225 - protein, 733 aa, Artificial Sequence
  Description of Artificial Sequence: Synthetic polypeptide
MTNVDRLPELLLKRKAVIYVRQSTQTQVQTNLESRRRQYDLVEEAKRRGFRDIEVIDEDMGRSASGAVARPGFERLVALLCAGEVGAVLCMDASRLARNGRDWHHLLELCGLVEARVIDLDGVYDPCRANDRLLLGMKGSISEFELNVLRTRMLDAKRAKAYRGDLRISVPFGYIWHREVGLGLDPNLRLQEVIRLIFARFRELGSARQVLLSLRAEQVHFPRPSDGRTLTHFDWIPVRYRNVISVLKNPFYAGAYVYGKSGKQMAIVDGRARKSYKHPKPFDEWDVLLREHHEGYIDWAEFERNQKQLATNAYGKAGDVKSSRGGRALLAGLLACARCGRRLFVAYTGRIPQPVYRCARFDMPPQCMSFGGSRIDAAIGKELLRVVEPMAIEAARQAEQMHVDTLNGQRRIVELELQQAQYEATLAERRYAACDPDNRLIAAQLEKNWEAALHRVLACQTRLETVSTPAADVPTPDFAKLAEDLTAAWNAPNVTMRMRQQLVRALIVDIVADVDETAREVILTIHWQGGQHSQLRVRKPGSGEHGCSTSDEALAVIRSMATRWSDQDIAASLNRMGMRTGQGKTWTAHRVSSIRRVRDIHAYRPAEKDGEWLTMSEAAKQLGITSHAIRRLINDRILPAEQVMGSSARQSSSSWPASRSLRACDGGSCKIQTDSPLPLCTMPARSDQSSSGPQIAWPTPVCAHRIDLPSADSFINEAVIVQLENFNFNVCLN

SEQ ID NO: 3226 - protein, 720 aa, Artificial Sequence
  Description of Artificial Sequence: Synthetic polypeptide
MNPKREAHNRRSEKIDDLHLDRLAVVYVRQSTLQQVLEHQESTRLQYGLVDRAEALGWQRERVLVIDEDLGKSGTTAVGRSGFQRLVAEVSLNHVGLILGIEMSRLARCSKDWHQLLEVCALFRTLIGDLDGIYDPSQYNDRLLLGLKGTMSEAELHVLKTRLLEGKLNKARRGELPFDPPIGYLRRPSGEVIFDPDEQAQQVVHLIFRKFEEIGTLNGVLRYLVRADIQIPVRIREGINRGDLEWRKPNRMTLQNLLKNPAYTGAYAYGRRQQDPRKQQPGRPKTGRVVNAPEDWHALVFDQFPAYISWEQYQQNLARLAANQSRAETIGAARHGAALLSGLLVCQYCGCRMTVHYSGQGKTHEYLCNRRLKDYADRGCQHIAGRSLDVAITQQVLQALEPAALELSLQAAQSIEQERTELDKLWQQKLERANIEAERSGRHYRQVEPENRLVARQLGKEWEAKLATVEQVQEDYQRFLAQEPLTLSEVERSAIRQLAQDIPTLWNANTTTNAHRKEIMRQLINRIVVEAQGQSEQVKLVIEWLGGFQSEQIVVRPVASFEQLSYYPQLCQQVQAFVVQGLDAAAIAAQLNQSGFRPPRLQGGFSHQSTLELLRRLGLHQRRPKGYNKEPLADGEWWIPGLARQIGIPDGTLYQWVKRGWIEGRKQEKPPYRWIIRADEAEIERLNKCRQMSFSDRMRQQWQGETSVLAQSNESDDERT

SEQ ID NO: 3227 - protein, 716 aa, Artificial Sequence
  Description of Artificial Sequence: Synthetic polypeptide
MPWERANSKVCDRHLQRLAVVYVRQSTRQQVLSHQESTRLQYALKDRAVALGWEADRVLVIDDDLAMSATSAVARTGFQRLVTEIGLDHVGLVLGIEMSRLARSGKDWYQLIELCALSGALLADLDGVYDPADYNDRLVLGLKGTISEAELHLIKQRMWNGRLNKARRGELAFPLSSGYVRLPSGEVGFDPDEQVQTVIYLLFAQFERIGTLHGMLRYLVRHDIQLGIRLREGPDKGTLEWRRPNRMTLQTLLHNPAYADIYAYGRRRVDPRRKDPARPGTGRVVQARDEWLVMIPNVLPAYITITQFEANEARLAANRARAEATCAVRSGPALAAGLVFCGRCGRRMTVRYHTQHGHNLPEYMCVREVTNYGADKTCQLLNAACVDAFVEQQVLIALTPAAVEVSLDAADQVVAERAELEKLWSQKLERAEYEADRARRCYHLAEPENRLVVRQLEKEWETALAAQQKLREDHERFTRTSPRVLTAAERQTITALASDIDGLWHARTTTITDRKETVRAIVDKVVITVIGTTERVQAMLVWAGGATTSGELVRPVQGLEQLSYYPQLAARVRELAGQGARSTAITRHLEAEGFRPAKRGKRITEPTVRALMRRLGCMPDRVQPRRLAPPGEEPGPDEWWLDQLADELDMPMGTLHSWIRCGWLTIRKETRHPYRVIAHADQAELAVLHERRTRPPGWYSRRLWADSTDELTHPHS

SEQ ID NO: 3228 - protein, 705 aa, Artificial Sequence
  Description of Artificial Sequence: Synthetic polypeptide
MNVHLKVQPHHLERGAYLYIRQSSMRQVVENVESARRQYALRGRAVALGWRDEQIIVIDNDQGESGASAAWREGFQRLVSDVGMGHAGIVMGLEVSRLARNNADWQRLLEICALADTLILDEDGVYDPASFNDRLLLGLKGTMSEAELHVIKARLRGGILNKVRRGEFRCLLPTGLVYDHFGNVTLDPDMQVRETIIHFFEMFSRLGSASQTVKVFRNEGLLFPSRLHNGDTLFRPLTASTAMRVLNNPRYAGAYTYGRRQFRRTIDGKKTLRARDIDDWPACIPDAHPGYISWERHQENLKILKANGRGFEAARASIPREGPALLQGRAVCGQCGSHLRVRYAARRGRQEAWYICNRARIYRGEPMCQSIAGPPVDEAIGMLIAEQMTPAAVELALEVRKEIQARHEEADRLRCRAIERAQTEAELAQRRFMLVDPSNRLVADTLEGEWNEKLRTLASAREERERGREHDQFILDKAVHERLVAMTADFNQLWKDPDTPSRERKRLLAHIIEDVTLLKLPAEGTTKLHVRFKGGKIQTLTTMNPKSSPQQIKTKPSIIELVDRLLDDYIYPEIAEILNEQGHRPGGTARRGCQDARFTPLKVAYLIHEYKLRSRYDRLRQRGMLTRQEAAAHLNISEQTVARWAKFGLITRHAYNGHYSLYEIADGDLPQKQCSRWNPLEDRAAAYRQMQTEPRTSTGEERGVV

SEQ ID NO: 3229 - protein, 705 aa, Artificial Sequence
  Description of Artificial Sequence: Synthetic polypeptide
MSDATRSPKLRPWHLDRAAFVYVRQSTPQQVLDHRESTDRQYALADRAVALGWPRDRVTTIDDDLGKSGQSIEGRPGFQRLLAEVALDNVGLILGLEMSRLARSNRDWHQLLELCARFRVLLADADAVYDPADHNDRLLLGLHGMLNEAELHVIKERMCQGRLNKARRGEPMGSPPLGYVRLASGEWAIDPDEQVQATVRLIFDRFDREGTLHGLLRYLVHHGVRIPIRPRHGPNRGGLEWRRPNRPTLSNVLHHPAYAGAYRFGHREVDPRRKRPGRPDTGKLVRRPEECLVLIRDRLPAYITWERFCDNQERLEANRARRDRPGAPRQGASLLAGLLRCGRCGRRMLVRYSGATGRYSYTCARGAADHAEPICQSLSGPALDGLVAGRVLAAVEPAALEASLAAVAEVERERSELARHWRLRLERAGCEADRAARQYQACEPENRLVGRELERRWEEALRAQRRLEDEHERWRGSAPGRLSPDDERTIRSLAGDLPAVWQATTTTPAERQRIARLLIDHVSVTVDKASERVDVTLHWSGGMTESHAMSRPVKRYDLLADYPRLVERLRGWRAERLSPAAMAERLNVEGFRPPKRAERFTRGMVQRLLWHLGLARTPFGSPAGLGRDEYRPSSLARRLGVSRDTVRRWVRVGWLTAHRDAQGHHVIWADGSELRRLRELRRLPRTWANKGRLAELTRPRPRPGR

SEQ ID NO: 3230 - protein, 705 aa, Artificial Sequence
  Description of Artificial Sequence: Synthetic polypeptide
MNVHLKVQPHHLERGAYLYIRQSSMRQVVENVESARRQYALRGRAVALGWRDEQIIVIDNDQGESGASAAWREGFQRLVSDVGMGHAGIVMGLEVSRLARNNADWQRLLEICALADTLILDEDGVYDPASFNDRLLLGLKGTMSEAELHVIKARLRGGILNKVRRGEFRCLLPTGLVYDHFGHVTLDPDMQVRETIIHFFEMFSRLESASQTVKVFRNEGLLFPSRLHNGDTLFRPLTASTAMRVLNNPRYAGAYTYGRRQFRRTIDGKKTLRARDIDDWPACMPDAHPGYISWERHQENLKILKANGRGFEAARASIPREGPALLQGRAVCGQCGNHLRVRYAARRGRQEAWYICNRDHIYRGEPMCQSIAGPPVDEAIGMLIAEQMTPAAVELALDVRKEIQARHEEADRLRCRAIERAQTEADLAQRRFMLVDPNNRLVADTLEGEWNEKLRILANAREERERGREHDQFILDKAVHERLVAMTADFNELWKDPDTPSRERKRLLAHIIEDVTLLKLPAEGTTKLHVRFKGGKIQTLTTMNPQSSAQQIKTKPNIVELIDKLLDDYIYPEIAEILNEQGHRPGGTARRGCHDARFTPLKVAYLIHEYKLQSRYDRLRQRGMLTRQEAAVHLNISEQTVARWAKYGLIARHAYNGHYSLYEIPDGDLPQKQCSRWNQLQDRTAARQQTQTEPRTSTGEERGVV

SEQ ID NO: 3231 - protein, 705 aa, Artificial Sequence
  Description of Artificial Sequence: Synthetic polypeptide
MNVHLKVQPHHLERGAYLYIRQSSMRQVVENVESARRQYALRGRAVALGWRDEQIIVIDNDQGESGASAAWREGFQRLVSDVGMGHAGIVMGLEVSRLARNNADWQRLLEICALADTLILDEDGVYDPASFNDRLLLGLKGTMSEAELHVIKARLRGGILNKVRRGEFRCLLPTGLVYDHFGNVTLDPDMQVRETIIHFFEMFSRLGSASQTVKVFRNEGLLFPSRLHNGGTLFRPLTASTAMRVLNNPRYAGAYTYGRRQFRRTIDGKKTLRARDIDDWPACIPDAHPGYISWERHQENLKILKANGRGFEAARASIPREGPALLQGRAVCGQCGSHLRVRYAARRGRQEAWYICNRARIYRGEPMCQSIAGPPVDEAIGMLIAEQMTPAAVELVLEVRKEIQARHEEADRLRCRAIERAQTEAELAQRRFMLVDPSNRLVADTLEGEWNEKLRTLASAREERERGREHDQFILDKAVHERLVAMTADFNQLWKDPDTPSRERKRLLAHIIEDVTLLKLPAEGTTKLHVRFKGGKIQTLTTMNPKSSPQQIKTKPSIIELVDRLLDDYIYPEIAEILNEQGHRPGGTARRGCQDARFTPLKVAYLIHEYKLRSRYDRLRQRGMLTRQEAAAHLNISEQTVARWAKFGLITRHAYNGHYSLYEIADGDLPQKQCSRWNPLEDRAAAYRQMQTEPRTSTGEERGVV

SEQ ID NO: 3232 - protein, 705 aa, Artificial Sequence
  Description of Artificial Sequence: Synthetic polypeptide
MNVHLKVQPHHLERGAYLYIRQSSMRQVVENVESARRQYALRGRAVALGWRDEQIIVIDNDQGESGASAAWREGFQRLVSDVGMGHAGIVMGLEVSRLARNNADWQRLLEICALADTLILDEDGVYDPASFNDRLLLGLKGTMSEAELHVIKARLRGGILNKVRRGEFRCLLPTGLVYDHFGNVTLDPDMQVRETIIHFFEMFSRLGSASQTVKVFRNEGLLFPSRLHNGDTLFRPLTASTAMRVLNNPRYAGAYTYGRRQFRRTIDGKKTLRARDIDDWPACIPNAHPGYISWERHQENLKILKANGRGFEAARASIPREGPALLQGRAVCGQCGSHLRVRYAARRGRQEAWYICNRARIYRGEPMCQSIAGPPVDEAIGMLIAEQMTPAAVELALEVRKEIQARHEEADRLRCRAIERAQTEAELAQRRFMLVDPSNRLVADTLEGEWNEKLRTLASAREERERGRENDQFILDKAVHERLVAMTADFNQLWKDPDTPSRERKRLLAHIIEDVTLLKLPAEGTTKLHVRFKGGKIQTLTTMSPKSSPQQVKTKPSIIELVDRLLDDYIYPEIAEILNEEGHRPGGTTRRGCQDARFTPLKVAYLIHEYKLRSRYDRLRQRGMLTRQEAAAHLNISEQTVARWAKFGLITRHAYNGHYSLYEIADGDLPQKQCSRWNPLEDRAAAYRQMQTEPRTSTGEERGVV

SEQ ID NO: 3233 - protein, 705 aa, Artificial Sequence
  Description of Artificial Sequence: Synthetic polypeptide
MNVHLKVQPHHLERGAYLYIRQSSMRQVVENVESAGRQYALRGRAVALGWRDEQIIVIDNDQGESGASAAWREGFQRLVSDVGMGHAGIVMGLEVSRLARNNADWQRLLEICALADTLILDEDGVYDPASFNDRLLLGLKGTMSEAELHVIKARLRGGILNKVRRGEFRCLLPTGLVYDHFGHVTLDPDMQVRETIIHFFEMFSRLESASQTVKVFRNEGLLFPSRLHNGDTLFRPLTASTAMRVLNNPRYAGAYTYGRRQFRRTIDGKKTLRARDIDDWPACMPDAHPGYISWERHQENLKILKANGRGFEAARASIPREGPALLQGRAVCGQCGNHLRVRYAARRGRQEAWYICNRDHIYRGEPMCQSIAGPPVDEAIGMLIAEQMTPAAVELALDVRKEIQARHEEADRLRCRAIERAQTEADLAQRRFMLVDPNNRLVADTLEGEWNEKLRILANAREERERGREHDQFILDKAVHERLVAMTADFNELWKDPDTPSRERKRLLAHIIEDVTLLKLPAEGTTKLHVRFKGGKIQTLTTMNPQSSAQQIKTKPNIVELIDKLLDDYIYPEIAEILNEQGHRPGGTARRGCHDARFTPLKVAYLIHEYKLQSRYDRLRQRGMLTRQEAAVHLNISEQTVARWAKYGLIARHAYNGHYSLYEIPDGDLPQKQCSRWNQLQDRTAARQQTQTEPRTSTGEERGVV

SEQ ID NO: 3234 - protein, 701 aa, Artificial Sequence
  Description of Artificial Sequence: Synthetic polypeptide
MLRATNSPDERVTAEHRGKLAYIYVRQSSVNQVRHHQESTELQYRLIDRAVALGWPHERVHVIDEDLGKSGSGCVEREGFKKLIAEIGLGNAGLVISLDASRLARNNRDWHQLLDLCSLFGVIIADGERLYDPCAYHDRLLLGLSGIMSEAELHQIKQRLHQGERQKAARGELRLGLPAGLAHDRSGQIILNPDEEVQARLCLVFSKFRELGSARAVMRYLRKENLPLPMRPLRGPAPHEVVWREASNPRVLSILHNPGYAGAYVYGRRRQTGGRVRQDVYRSRTAKVPIADWEVCLEAAHPGYIGWEEFMENQRRLENNINRYEAGHSGVPRKGAALLQGIAVCGRCGRRMSLRYSGPAGNYPVYTCRADRGHDGGPLCQEVRALPVDARVESILLEALTPDRIAIAVDALGQMEEEVRQLERQWALRRERARYEAERAHRQYDAVEPENRLVARSLERGWEEKLRAAETIEQDYERWRSNEPLVLSEADRDGLLAIGENLPGIWHAPSTTAAERKSILRLIICEVVLDQKRLQGQVWIKILWQTGATSEHSLQRRVHTYGDYLNIDRLRTRVTELNAAGKMDKEIASELNAEGFLAAQNCAFKGDNVWLLRRRWGIATVKINGTSPNPFRWPDGTYSVQGAAAALGITPQTIFKYMARGLIQGRQLVKGQPWQIELTEDQIDILRARAQRNRRSRKQAS

SEQ ID NO: 3235 - protein, 701 aa, Artificial Sequence
  Description of Artificial Sequence: Synthetic polypeptide
MLSVTNPSDERLTSARRAKLAYIYVRQSTVTQIKHHQESTELQYRLVDRAEDLGWPRERIQVIDEDLGKSGAGTTDRQGFQKLISEISLGHAGLVMSLDASRLARNNRDWHQLLELCSLFGVLLADGERLFDPCAYHDRLLLGLSGIMSEAELHQIRLRLHQGERQKAARGELRLPVPAGLVHDRSGAVTLNPDEEVQARVALVFAKFRELHSAHAVRRYLRANGLPLPVRPLRGPSPHDVVWREATSARVRSILQNPALAGAYVYGRRRQAPGQARAGSCRPSTIKVPVAEWEVCLQESHPGYISWEEFMANQRRLADNVNRYDADHVGVPRKGAALLQGIAMCGRCGRRMSLRYTGPQGDYPVYCCRADRDQTGAPLCQEVRALAVDARVEAILLEALKPDQIAIALAALGQLDREARQLERQWGLRRERARYEAERAQRQYDAVEPENRLVARSLERAWEEKLRAVEAVDQEHDRWRREQPLVLSADDRATLQALGQNLPQVWHAVTTTAADRKRILRFVIREVILDQKRITGHVWLKILWQTGATSEHAVQRRVHTYKDYADLDRLRQQITELNAAGKMDKEIAQILNQEGFTTARGCRFRGENVWLLRDRWGIATVKINGVAANPMRWSDGSYSVQGVASLLGVTPQVIFDYLARGFLVGRQLVKGQPWQIDPTDDQIRYLQNRLQRIRRSKKVAS

SEQ ID NO: 3236 - protein, 700 aa, Artificial Sequence
  Description of Artificial Sequence: Synthetic polypeptide
MLISSNIADERLTTAHRAKLAYVYVRQSSVNQVRQHQESTELQYRLVDRAIGLGWPPERVQVIDEDLGKSGAGGVDRHGFQKLIAEIGLGNAGLVVSLDASRLARNNRDWHQLLELCSVFGVVIADGERLYDPRAYHDRLLLGLSGIMSEAELHQLRMRLHQGERQKAARGELRLPLPAGLAYDRTGTIILNPDEEVQARFHLVFAKFRELQSARRVMRYLDRNGLSLPVRPLLGPSPHEVVWRAPDSARVLNILQNPAYAGAYVYGRRQKDPSRCRPGSLTGTVKVAIADWAVCLHAAHPGYISWEEFMANQGRLADNVCRYEAGHSGVPRKGAALLQGIAVCGRCGRRMSMRYTGPHADYPVYCCRSDRDQQGSALCQEVRALAVDALVERIVLDALVPDQIEIALAAAGQLEQENRQLERQWALRVERARYEAERARRQYDAVEPENRLVARSLERAWEDKLRVVEAVEQQHARWRAQEPLLIGPTERAGLQALGENLPRIWNAATTSAADRKRILRFVIREVVLDQKRTRGQVWFKIVWQTGATSEHHVQRRVQAYRNYIDIDRLRQRIVELNAEHKMDGEIAAILNQEGFVAARGCAFKGENVWLLRTRWSIPTVKINGVDKNPMRWPDGSFSIQGAAAELCVTPQTVFDYLARGMLTGRQLTKGQPWQIELSDEQMSQLRNRVRRTKRSKKEAS

SEQ ID NO: 3237 - protein, 699 aa, Artificial Sequence
  Description of Artificial Sequence: Synthetic polypeptide
MNVHLKVQSHHRERSAYLYIRQSSMRQVIDNTESAMRQYALRGRAIALGWREEQIIVIDNDQGESGASAVWREGFQRLVSDVGMGHAGIVMGLEVSRLARNNADWQRLLEICALADTLILDEDGVYDPASFNDRLLLGLKGTMSEAELHVIKARLRGGILNKARRGEFRCPLPTGLVYDHSGNVALDPDMQIRETIAHFFETFSRVGSASQTVKAFRQEGILFPSRLHDSQTVFRPLTPSTAMRVLHNPRYAGAYAYGRRRYRRTIDGKKLVREQGTDDWTACIPDAHPGYISWEQHQENLRILKSNICHKWNAGVASPPREGPALLQGRAVCGQCGRHFHMRYAARRGRQEAWYVCDRARSNRGEHVCQAIAAPPVDEAIGMLIADQMTPAAVELAIEVRKEIEARHEEADRLRCRAIERAQTEADLAQRRFMLVDPNNRLVADTLEGEWNEKLRILANAREERERAQEHDQFILNKAVQERLVTMTADFKKLWTNSETPNRERKRLLAHIIEDVTLLKLPKRGTTKAHIRFKGGKTQTLVTISPKSPSQQVKTSPDVIQLIDKLLDDHIFSEIADILNNQGYRPGSVTRRDQRNARFTTKRVTYLVREYKLRSRYDRLRDRGMLTKKEAAAHLNIHEHTLARWAEHGLVTSHAYNGHYYLYELPKSDLPQKQCSRWNQLVDRLAAHKENARHAKTFN

SEQ ID NO: 3238 - protein, 699 aa, Artificial Sequence
  Description of Artificial Sequence: Synthetic polypeptide
MNVHLKVQSHHRERSAYLYIRQSSMRQVIDNTESAMRQYALRGRAIALGWREEQIIVIDNDQGESGASAVWREGFQRLVSDVGMGHAGIVMGLEVSRLARNNADWQRLLEICALADTLILDEDGVYDPASFNDRLLLGLKGTMSEAELHVIKARLRGGILNKARRGEFRCPLPTGLVYDHSGNVALDPDMQIRETIAHFFETFSRVGSASQTVKAFRQEGILFPSRLHDSQTVFRPLTPSTAMRVLHNPRYAGAYAYGRRRYRRTIDGKKLVREQGTDDWTACIPDAHPGYISWEQHQENLRILKSNICHKWNAGVASPPREGPALLQGRAVCGQCGRHFHMRYAARRGRQEAWYVCDRARSNRGEHVCQAIAAPPVDEAIGMLIADQMTPAAVELAIEVRKEIEARHEEADRLRCRAIERAQTEADLAQRRFMLVDPNNRLVADTLEGEWNEKLRILANAREERERAQEHDQFILNKAVHERLVTMTADFKKLWTNSETPNRERKRLLAHIIEDVTLLKLPKRGTTKAHIRFKGGKTQTLVTISPKSPSQQVKTSPDVIQLIDKLLDDHIFSEIADILNNQGYRPGSVTRRDQRNARFTTKRVTYLVREYKLRSRYDRLRDRGMLTKKEAAAHLNIHEHTLARWAEHGLVTSHAYNGHYYLYELPKSDLPQKQCSRWNQLVDRLAAHKENARHAKTFN

SEQ ID NO: 3239 - protein, 697 aa, Artificial Sequence
  Description of Artificial Sequence: Synthetic polypeptide
MLRDYAVDERISTTQQAKLAYVYVRQSSVGQIRHHQESTALQYRLVDRALGLGWPRERVEIIDDDLGKSGAEAQHRYGFQRLIAEVGLGHAGLVLSYDASRLARNNSDWHQLLQLCSMFSVLIADSERIYDPGLYHDRLLLGLSGIMSEAELHQIRMRLHTGERQKAARGELRIPLPAGLIYAPAGGIMLNPDAQVQERIRLVFDSFMRLGSAKAAVRYLRQADLALPVRPLKGPAPHEIAWRDATDARVRNILKNPVYAGAYVYGRRCAAPEKRSEGGKNPTRAVPREQWEVCIQNAHPAYISWETHMAISDKLTDNVGNFKAGHRGMSRKGKALLQGIAMCGSCGRRMALNYSGPDSNHPVYRCRSERATCVGQYCQEVRAPRVEAEVERQFLAALTPDQLAIALAALDAIDADVHGLERQWTLKRERAEYECERARCQYDAVEPENRLVARSLESIWESKLREVEKVEQDYRRWKTEQTVALNADDRARIAAFGIDLPDLWERIENSERKAMLRLVIDKVILDQRRAKGMVWIRIIWQTGAATEHWVMRRTQSYAEAAHADVLEQRIRELNAAGMMDAEVATALNIEGLRNSLDGLFDHNTVHLLRQRWNIPTVKINGVEHNPPRWPDGSYSIQGAATALGVTEQTVFKWLKRGKLQGRQLKKGQPWQVDLTLQQIKALTAPNYSMTPSRKAAS

SEQ ID NO: 3240 - protein, 696 aa, Artificial Sequence
  Description of Artificial Sequence: Synthetic polypeptide
MKSELIKPIHLARRAVVYIRQSTTHQVVTNQESLRLQYALRQRAIELGWPEAGIDVIDADLGISGASAAQRSGFKELVGRVGLKEVGLILSIDVTRLARNCSDWYPLLDICGLHGCLIADRDGVYDPGSANGRLLLGLKGTISELELHTIRSRLTAGLLAKAERGELALTLPIGLVRDPSGVVVKDPNLEVQERLELLFETFLKVRTIAKVMREFNDRGLELPRRDRHGDLHWARATTSAVAAILKNPAYAGAFVYGRTRLRRPSDGRLPTKVPKPIEQWRIIVKDRYPPYIAWQSYEKIRGIVSDNRAEYMRNKTRGAPREGELLLQGIAWCGRCGHKMYARYKGGAEYVCNHLHSHQGLPACQYIRARRVDAAVAQAFLTALAPAEIDALSCARRAQQQAYKAMQSGAEQQLERRRYEAALAERQFNRVDPDNRLVAAELECRWEVALKEVRVAEEALARLKSPQAIAQITVGNKVLNDKVVRLSGRLPEIWTDPGTTDAKRKALLRCLIDKVILDRGEHDVVRMRIVWRGGAVTDIEVKMRVNSVADLTQGAEMRERVLELARAKMHDDEIAAKLTSEGHRSPNCPDKVLPITVQRIRLHAGLKGLTEQRTRWRHSTDLLSAQQLAGVLNIPVNWLYVQIRQGRLLIDRHPSGAHLFSNTSRVIEAVRKLRNHELDQLDLRITEPHEEGHQHA

SEQ ID NO: 3241 - protein, 696 aa, Artificial Sequence
  Description of Artificial Sequence: Synthetic polypeptide
MSTKITVDHLGRGAAIYVRQSTPGQLINHTESRRRQYDLADAARAAGFVDVMIIDEDLGRSGSGLECRPGFQKLVAAVCAGTVGAVYCIEASRLARNGRDWHHLIDLCALAGALVVDPDGVYDPRLLNDRLLLGLKGTMSEYELSLLRQRGIEARDGKARRGELRFTLPPGYCWNEAGRIEIDPDARVAGAIRMLFSKFRELGSARQVFLWARAAELSLPVVRRNLIACKILWQPPAYHTVIQVLQNPIYAGAYVFGRRGNRTRVVEGRARKTSGHKRERTDWNTLLRDNHEGYITWAEFEEHQRMLEENAHMQKRAARKAGRGGRALLTGLVRCGHCGRKMRVFYGMQSGHAHRYQCRGDDAHVGVGLCIGIGGIRVDRAVVAQMLEAVSTRAVEAALLAADQAAAAGAEERAALERELEAARYDASLAARRYDLVEPEKRHVVRELEARWNTALERVAQIERRIAEAEARSSARPRVNRAALLGLAHDLSAAWNAPTADTRTRQRLTRLLVEEVVIDLDDTAHEAVLRIHWVGGRHTELRVPRARTGRRANKAHPGAVEVVRKLSGHWPDHEISVTLNRMKCRSDNGETWTTVKVRLLRERLGLSDFDPTVPRPETLTADKAAKRLGISIPSVHRLIQRGILPATQLVSSAPWHIPVAALDTDAVRTGVNEIKARRPKNLIDYQRDETMPLPGL

SEQ ID NO: 3242 - protein, 696 aa, Artificial Sequence
  Description of Artificial Sequence: Synthetic polypeptide
MSPKITADHLGRGAAIYVRQSTPGQLINHTESRRRQYDLADAARAAGFVDVMIIDEDLGRSGSGLESRPGFQKLVAAVCAGTVGAVYCIEASRLARNGRDWHHLIDLCALAGALVVDPDGVYDPRLLNDRLLLGLKGTMSEYELSLLRQRGIEARDGKARRGELRFTLPPGYCWNEAGRIEIDPDERVAGAIRMLFSKFRELGSARQVFLWARAAELSLPVVRRNLIACKILWQPPAYHTVIQVLQNPIYAGAYVFGRRGNRTRVVEGRARKTSGHKRERTEWNTLLRDNHEGYITWAEFEEHQRMLEENAHMQKRAARKAGRGGRALLTGLVRCGHCGRKMRVFYGMQSGHAHRYQCRGDDAHVGVGLCIGIGGIRVDRAVVAQMLEAVSARAVEAALLAADQAAAAGAEERAALERELEAARYDASLAARRYDLVEPEKRHVVRELEARWNTALERVAQIERRIAEAEARSSARPRVNRAALLGLAHDLSAAWNAPTADARTRQRLTRLLVEEVVIDLDDAAYEAVLRIHWIGGRHTELRVPRARTGRRADKAHPGAVEVVRKLSGHWPDHEISVTLNRMKCRSDNGETWTTVKVRLLRERLGLSDFDPTVPRPETLTADKAAKRLGISIPSVHRLIQRGILPATQLVPSAPWHIPMAALDTDAVQTGVNEIKARRPKNLIDYQRDETMLLPGL

SEQ ID NO: 3243 - protein, 696 aa, Artificial Sequence
  Description of Artificial Sequence: Synthetic polypeptide
MSTKITVDHLGRGAAIYVRQSTPGQLINHTESRRRQYDLADAARAAGFVDVMIIDEDLGRSGSGLECRPGFQKLVAAVCAGTVGAVSCIEASRLARNGRDWHHLIDLCALAGALVVDPDGVYDPRLLNDRLLLGLKGTMSEYELSLLRQRGIEARDGKARRGELRFTLPPGYCWNEAGRIEIDPDARVAGAIRMLFSKFRELGSARQVFLWARAAELSLPVVRRNLIACKILWQPPAYHTVIQVLQNPIYAGAYVFGRRGNRTRVVEGRARKTSGHKRERTDWNTLLRDNHEGYITWAEFEEHQRMLEENAHMQKRAARKAGRGGRALLTGLVRCGHCGRKMRVFYGMQSGHAHRYQCRGDDAHVGVGLCIGIGGIRVDRAVVAQMLEAVSTRAVEAALLAADQAAAAGAEERAALERELEAARYDASLAARRYDLVEPEKRHVVRELEARWNTALERVAQIERRIAEAEARSSARPRVNRAALLGLAHDLSAAWNAPTADARTRQRLTRLLVEEVVIDLDDTAHEAVLRIHWVGGRHTELRVPRARTGRRANKAHPGAVEVVRKLSGHWPDHEISVTLNRMKCRSDNGETWTTVKVRLLRERLGLSDFDPTVPRPETLTADKAAKRLGISIPSVHRLIQRGILPATQLVSSAPWHIPVAALDTDAVRTGVNEIKARRPKNLIDYQRDETMPLPGL

SEQ ID NO: 3244 - protein, 696 aa, Artificial Sequence
  Description of Artificial Sequence: Synthetic polypeptide
MSTKITVDHLGRGAAIYVRQSTPGQLINHTESRRRQYDLADAARAAGFVDVMIIGEDLGRSGSGLECRPGFQKLVAAVCAGTVGAVSCIEASRLARNGRDWHHLIDLCALAGALVVDPDGVYDPRLLNDRLLLGLKGTMSEYELSLLRQRGIEARDGKARRGELRFTLPPGYCWNEAGRIEIDPDARVAGAIRMLFSKFRELGSARQVFLWARAAELSLPVVRRNLIACKILWQPPAYHTVIQVLQNPIYAGAYVFGRRGNRTRVVEGRARKTSGHKRERTDWNTLLRDNHEGYITWAEFEEHQRMLEENAHMQKRAARKAGRGGRALLTGLVRCGHCGRKMRVFYGMQSGHAHRYQCRGDDAHVGVGLCIGIGGIRVDRAVVAQMLEAVSTRAVEAALLAADQAAAAGAEERAALERELEAARYDASLAARRYDLVEPEKRHVVRELEARWNTALERVAQIERRIAEAEARSSARPRVNRAALLGLAHDLSAAWNAPTADTRTRQRLTRLLVEEVVIDLDDTAHEAVLRIHWVGGRHTELRVPRARTGRRANKAHPGAVEVVRKLSGHWPDHEISVTLNRMKCRSDNGETWTTVKVRLLRERLGLSDFDPTVPRPETLTADKAAKRLGISIPSVHRLIQRGILPATQLVSSAPWHIPVAALDTDAVRTGVNEIKARRPKNLIDYQRDETMPLPGL

SEQ ID NO: 3245 - protein, 696 aa, Artificial Sequence
  Description of Artificial Sequence: Synthetic polypeptide
MNTKITPDHLGRAAVVYVRQSTMTQVTGNLESQRRQYDLAGAAATTGFASVTVIDDDLGRSGSGSMERPGFERLVAQVCSGDVGAVYCIEASRLARNGRDWHHLIDLCALAGTLVIDPDGAYDPRLVNDRLLLGLKGTMSEYELSLMRQRGIAARDSKAGRGELRFMLPPGLCWSEVGKIEIDPDEHVAETIRLVFAKFRELGSGRQVFLWLRSADIKMPVVLRNVDVCKLVWKAPAYHSVMQILHNPLYAGAYAFGRRAQRTRIIDGRARKATGVRKPRDEWSVLLRDNHQGYISWREYEENHKLLAENAHMKKNYDRKSARGGRALLTGLMRCGRCGRMMRVFYGSAKGNAHRYQCRGDDAHVGVGLCIGIGGVRVDRAVAVQILEAVSDRAVEAAIFASDQVERSRRDVIAALDRDLEGSRYEALLASRRYELVDPAKRHVARELEARWNDALERVGVLERKIKDLSALSAARPAIDRGRLLQLAQDLPTVWNAPSTETRTKQRLIHILVQEIICDLDDATNEAVLLIHWTGGRHTEVRVARVKTGRYPAELAPSAVEALRKLGGHWPDRELAVSLNRMLCKTGDGESWTAVRVRDMRERLGIPEYDATKVEIPMISLMKAAEKLGICVGSAKSLVQRGILPATQILPGSPWMVPVDALTSEAVRIGVQGVVDRRPKFYEDYQYDKVVRLPGI

SEQ ID NO: 3246 - protein, 696 aa, Artificial Sequence
  Description of Artificial Sequence: Synthetic polypeptide
MNTKITPDHLRRAAVVYVRQSTMTQVTGNLESQRRQYDLAGAAATTGFASVTVIDDDLGRSGSGSMERPGFERLVAQVCSGDVGAVYCIEASRLARNGRDWHHLIDLCALAGTLVIDPDGAYDPRLVNDRLLLGLKGTMSEYELSLMRQRGIAARDSKAGRGELRFMLPPGLCWSEVGKIEIDPDEHVAETIRLVFAKFRELGSGRQVFLWLRSADIKMPVVLRNVDVCKLVWKAPAYHSVMQILHNPLYAGAYAFGRRAQRTRIVDGRARKATGVRKPRDEWSVLLRDNHQGYISWREYEENHKLLAENAHMKKNCDRKSARGGRALLTGLMRCGRCGRMMRVFYGSAKGNAHRYQCRGDDAHVGVGLCIGIGGVRVDRAVAMQILEAVSDRAVEAAIFASDQVERSRRDVIAAIERDLEGARYEALLASRRYELVDPAKRHVARELEARWNDALERVGVLERKIKDLSALSAARPVIDRGRLLQLAQDLPTVWNAPSTETRTKQRLIHILVQEIICDLDDATNEAVLLIHWTGGRHTEVRVARVKTGRYPAELAPSAVEALRKLGGHWPDRELAVSLNRMLCKTGDGESWTTVRVRDMRERLGIPEYDATKVDVPMISLMKAAEKLGICVGSAKSLVQRGILPATQILPGSPWMVPVEALSSEAVRIGVQGVIDRRPKFYEDYQYDKVVRLPGI

SEQ ID NO: 3247 - protein, 696 aa, Artificial Sequence
  Description of Artificial Sequence: Synthetic polypeptide
MMSELIQPIHLKRKAVVYIRQSTPHQVVSNQESLRLQYALRQRARDLGWHEADIDVIDADLGLSGASAAHRSGFQELVGRVVLSEVGIILSIDVTRLARNCSDWYPLLDICGLRGCLIADRDGVYDPGSANGRLLLGLKGTISELELHTIRSRLTAGLIAKAQRGELALTLPVGLVRDPSGVVLKDPDTAVQGRLGLVFELFVKLRSIAKVMRTLNARGLDLPRRDRHGELHWARATVSAVAAILKNPAYAGAFVYGRTRMRDPTPDGRAPGKAKVARPLEEWRIVVKDRYPAYIDWPTYEKIRSIVSDNRAEYMRTKTRGIPRDGELLLQGIAWCGRCGHKMYARYKGGGEYVCNHLRTHSGLPTCQHIRAKAVDAAVADAFLSALAPAELDALSRARRAQSQVDSALRANAEREVERKRYAAALTQRQYNRVDPDNRLVAAELERRWESALMEVRAAEAALAEQSEQQPTAHMAMGKAFTGKVVALAGRLPKIWADSATTDTHRKALLRCLVDKVVLDRTPESALVRIVWRGGAVTDLDVKLRVTAIAKLARGAEMRARLLELAKAGVPDEEIAHILTSEGLRSANSADKVLPVTVQRIRLAEGIRTPPSCRRWSHDPGYLSTKALATKLEIPVNWLYVQIRKKRLLIDPQPTGAYLFPDTSLVLDGVRNLRNHIVNELDLRICQHDDRGYQHG

SEQ ID NO: 3248 - protein, 696 aa, Artificial Sequence
  Description of Artificial Sequence: Synthetic polypeptide
MNTKITSDHLGRAAIVYVRQSTMAQVTGNLESQRRQYDLAGAAATTGFASVTVIDDDLGRSGSGSVERPGFERLVALVCSGNVGAVYCIEASRLARNGRDWHHLIDLCALTGTLVIDPDGAFDPRLVNDRLLLGLKGTMSEYELSLIRQRGIAARDSKAGRGEFRFMLPPGFCWSEAGKIEIDPDEHVAEAIRLVFDKFRELGSGRQVFLWLRSADIKMPVVLRNVEVRKLVWKAPAYHSVMQILHNPLYAGAYVFGRRAQRTLIIDGRARKANGLRKPRDEWSVLLRDNHQGYITWREYEENQKLLTENAHMKRNCDRKSARGGRALLTGLIRCGRCGRMMRVFYGGAKGNAHRYQCRGDDARVGLGLCIGIGGVRVDRAVATQILEAVSDRAVEAAIFASDQVERSARDVIAAIERDLEGARYEASLAGRRYELVDPAKRHVARELEARWNDALERVSMLERKIEELSALSTARPAIDRGRLLQLAHDLPTAWNAPSTDTRTKQRLIHILVQEIICDLDDTTNQAVLLIHWTGGRHTEVRVARVKTGRYPSDMAPPAVEALRKLGGHWPDRELAVSLNRMLCKTGDGEGWTAVRVRDMRERLGIPEYDPTKAGSPVISLMKAAERLGICIGSAKSLVKKGILPATQILPGSQWMVPIEALTSEAVLIGVQGVVGRRPKIYEDYQYDKVVRLPGL

SEQ ID NO: 3249 - protein, 696 aa, Artificial Sequence
  Description of Artificial Sequence: Synthetic polypeptide
MHAKITVEHLARSALVYVRQSTMSQVLGNLESQKRQYQMAEAARDMGFAEVRVIDEDLGRSGSGQIARPGFQRLVAEVCAGTVGAVYCIEASRLARNGRDWHHLIDLCALTGALVVDPEGVYDPRLMNDRLLLGLKGTMSEYELSLLRQRGLAARDAKASRGELRFTLPPGFCWSEDDRIEMDPDERVQQAIRLIFAKFRELGSGRQVFLWLRAADIHLPVALRNGALRKIAWRKPAYHSVMQVLHNPIYAGAYAFGRTGNRTGVVDGQARKTSGHHRAIADWSVLIKDNHEGYLDWRAYEENRRMLEENAHMQKRAARKSGRGGQALLSGMARCARCGRMMRVFYKTGTDLSHRYQCRGDDGHVGAGLCIGAGGGGIDALVASQLLEAVSGQAVQAALLAGQQAAKAQETVRLAVEKELDEARYAAELAERRYEHVDPAKRHVARTLEARWNVALERVAAVEHKLAALGAELRAKPGVDPAVLMRLATDLPSVWNAVGTDARARQRLVRLLIEEVVIDIDAEENEFILLIHWIGGRHTEVRLARRKTGRFPPGRPLTAREVLRKLAGHWPDRELAVTLNRMRCRTEDGETWTTVRVAELRDKLAIPPYDPDAEVPKTLSVDAAAKRLGVCVASVHKLIRSQILPATQIMYSAPWKIPVDALETEAVRIGLQEIAVRRPRQALEKVADRSMPLPGF

SEQ ID NO: 3250 - protein, 696 aa, Artificial Sequence
  Description of Artificial Sequence: Synthetic polypeptide
MNTKITSDHLGRAAVVYVRQSTMAQVTGNLESQRRQYDLAAAAATTGFASVTVIDDDLGRSGSGSMERPGFERLVAQVCSGNVGAVYCIEASRLARNGRDWHHLIDLCALAGTLVIDPDGAYDPRLVNDRLLLGLKGTMSEYELSLMRQRGLVARDSKAKRGEFRFMLPPGFCWSEAGKIEIDPDEHVAETIRLVFAKFRELGSGRQVFLWLRSADIKMPVVLRNVDVCKLVWKAPAYHSVMQILHNPLYAGAYAFGRRAQRTLIVDGRARKANGLRKPRDEWSVLLRDNHRGYITWREYEENHKLLAENAHMKKNCERKSARGGRALLTGLMRCGRCGRMMRVFYGSAKGNAHRYQCRGDDAHVGVGLCIGIGGVRVDRAVAIQILEAVSDRAVEAAIFASDQVERSQRDIIAAIERDLEGARYEALLASRRYELVDPAKRHVARELEARWNDALERVGVLERKIKELSALSAARPVIDRGRLLQLAHDLPTVWNAPSTDTRTKQRLIHILVQEIICDLDDATNEAVLLIHWTGGRHTEVRVARVKTGRYPAELAPSAVEALRKLGGHWPDRELAVSLNRMLCKTGDGESWTTVRVREMRERLGIPEYDAAKVDVPMISLTKAAETLGICVGSAKSLAKKGILPATQILPGSQWMVPVAALTSETVRIGVQRVVDRRPKFYEDYQYDKVVRLPGL

SEQ ID NO: 3251 - protein, 695 aa, Artificial Sequence
  Description of Artificial Sequence: Synthetic polypeptide
MKSELVTPSHLARKAVVYIRQSTPHQVVSNQESLRLQYALRQRARELGWREAAIDVIDADLGLSGASIAQRNGFKELVGRVGLSEVGLILSIDVTRLARNCTDWYPLLDICGLRGCLIADRDGVYDPGTPNGRLLLGLKGSISELELHTIRSRLTAGLLAKAERGELAVMLPIGLMRDPSGVVVKDPDMAVQGRLGLVFQLFLQLRSVAKVMRALNERDLELPRRDRYGDLCWTRATLAAVAAILKNPAYAGAFVYGRTRFRPPKREGALPQKAPRPMEEWRIVVKDRYPAYIDWPIYEKIRSVIRDNRAEYMRIKTRGAPRNGELLLHGIAWCARCGHKMYVRYKGGGEYVCNHLRTQEGQPTCQHIRAAHIDAAVGDAFLTALAPAELDALSRSRRVQQQTNNALRSSAERELERKRYTAALAERQFNRADPDNRLVASELERRWEAALNDVRAAEEALARQTPPKAITQVAISKELNDKVISLTGRLPQIWGDETISDAHRKALLRCLIEKVVLDRGERDLALARIVWRGGAVTELEVKMSVNSVTRLTRGTEMRERLLTLARDGVPDDKIATILTREGHRSPRCADKVLPITVGRLRRAAAIKVTAQRSRWEHDDSYLSPPELARRLEIPVNWLYVQIRTKRLLIDRQPSGAYLFPNTPSVLHAIGDLRNHVIAQLDLRICQPNKEGHQHG

SEQ ID NO: 3252 - protein, 695 aa, Artificial Sequence
  Description of Artificial Sequence: Synthetic polypeptide
MSMNSESHQKITSAHLSRMAYLYVRQSTLRQVLENTESTQRQYALRERAAALGWPLERIVVIDRDLGQSGASAADREGFQQLVSEVSLGHVGIVLGLEVSRLARNSTDWHRLLELCAFADTLILDEDGLYNPGLFNDRLLLGLKGTMSEAELHVLKARLRGGILSRARRGELKQMLPVGFVHDVQDRVILDPDVQVQSAVRLFFETFKRTGSCLAVVKDFHARGLLFPRRLRSGAHKGELVWAELLHCRARQIIHNPRYAGAFVFGRTKQRHLPNGKICSRLVPSEEWILLRDMHPGYISWEEYQSNRQQVQGNALSWSDDRRRSPAREGNALLQGLVICGTCGERMTVRYHLHRGQSVPTYWCGRRPMHRGESGLCQTVHGGTLDTAIGDVVIEAMTPFAIEVALTVQQELASRHEEADRLRRQHVERARYEADLAQRRFLKVDPDNRLVADALEADWNARLRALADAQQVYEKASVSDSNVVTDAERVELLALATDFPRLWRNPRTQMKEKKRMLRLLIEDITLTKADALHVDIRFAGGATRSLDLALPKSCVELRTTDAEVIKEIDQLIDTYTDGEIADVLNERGVRTVVTTPWTAARVGRLRNTYHLSDRRTRLLALGLLTPEDVAARYGVAVSTVHLWRRRGLLRAHPVNDRGDYLYEIPPEDLPAKYAHKREYRVEPSTTHSRNAGGAV

SEQ ID NO: 3253 - protein, 695 aa, Artificial Sequence
  Description of Artificial Sequence: Synthetic polypeptide
MKSELVKPTHLARRAVVYVRQSTPHQVISNQESLRLQYALRERARELGWHEADIDVIDADLGISGASTTGRNGFKELVGRVGLSEIGLILSIDVTRLARNCSDWYPLLDICGLRGCLIADRDGVYDPGSANGRLLLGLKGTISELELHTIRSRLTAGLLAKAERGELALMLPVGLVRDASGVVVKDPDLGVQERLELVFRTFLKFRTVAKVMRVLNDRDLPLPRRDRFGELRWARATVSAVARILKNPAYAGAFVYGRTRFRAAGRDGGSEAKTPKDIKDWRIIVKDRYPHYIDWSTYEKIRDIVRDNRAEYMRAKTRGAPRDGELLLHGIAWCGRCGYKMYVRYKGGGEYACNHLHSHSGLPDCQRVRAAQIDAAVADAFLAALAPGELDALARARQAQQQVNKALRAGAERELERKRYAAALAERQFNRVDPDNRLVASELERRWEAALSELRAAEDAVAQRASTEPAKRTGFSKDLNNKVVALFDSLPQIWANDATTDAHRKALLRCLVEKVVLDRGERDVALARIVWRGGAVTDLHVKMKVNSVAKLTRGEELRARLLELALTGVPDDQIAEILTREGHHSPNCEDKVLPITVQRLRLAAGIKAKAQRNRWTHEPTLLSAVQLAARLDIPVNWIYVQIRRKRLLIDQQSTGAYLFQNSPAVVNAVRDLRNRTINHLDLRIIQPHQEGHQHA

SEQ ID NO: 3254 - protein, 695 aa, Artificial Sequence
  Description of Artificial Sequence: Synthetic polypeptide
MKSELVKPTHLARRAVVYVRQSTPHQVISNQESLRLQYALRERARELGWHEADIDVIDADLGISGASTTGRNGFKELVGRVGLSEIGLILSIDVTRLARNCSDWYPLLDICGLRGCLIADRDGVYDPGSANGRLLLGLKGTISELELHTIRSRLTAGLLAKAERGELALMLPVGLVRDASGVVVKDPDLGVQERLELVFRTFLKFRTVAKVMRVLNDRDLPLPRRDRFGELRWARATVSAVARILKNPAYAGAFVYGRTRFRAAGRDGGSEAKTPKDIKDWRIIVKDRYPHYIDWSTYEKIRDIVRDNRAEYMRAKTRGAPRDGELLLHGIAWCGRCGYKMYVRYKGGGEYACNHLHSHSGLPDCQRVRAAQIDAAVADAFLAALAPGELDALARARQAQQQVNKALRAGAERELERKRYAAALAERQFNRVDPDNRLVASELERRWEAALSELRAAEDAVAQRASTEPAKRSGFSKDLNNKVVALFDSLPQIWANDATTDAHRKALLRCLVEKVVLDRGERDVALARIVWRGGAVTDLHVKMKVNSVAKLTRGEELRARLLELALTGVPDDQIAEILTREGHHSPNCEDKVLPITVQRLRLAAGIKAKAQRNRWTHEPTLLSAVQLAARLDIPVNWIYVQIRRKRLLIDQQSTGAYLFQNSPAIVNAVRDLRNRTINHLDLRIIQPHQEGHQNA

SEQ ID NO: 3255 - protein, 695 aa, Artificial Sequence
  Description of Artificial Sequence: Synthetic polypeptide
MKSELVKPTHLARRAVVYVRQSTPHQVISNQESLRLQYALRERARELGWHEADIDVIDADLGISGASTTGRNGFKELVGRVGLSEIGLILSIDVTRLARNCSDWYPLLDICGLRGCLIADRDGVYDPGSANGRLLLGLKGTISELELHTIRSRLTAGLLAKAERGELALMLPVGLVRDASGVVVKDPDLGVQERLELVFRTFLKFRTVAKVMRVLNDRDLPLPRRDRFGELRWARATVSAVARILKNPAYAGAFVYGRTRFRAAGRDGGSEAKTPKDIKDWRIIVKDRYPHYIDWSTYEKIRDIVRDNRAEYMRAKTRGAPRDGELLLHGIAWCGRCGYKMYVRYKGGGEYACNHLHSHSGLPDCQRVRAAQIDAAVADAFLAALAPGELDALARARQAQQQVNKALRAGAERELERKRYAAALAERQFNRVDPDNRLVASELERRWEAALSELRAAEDAVAQRASTEPAKRSGFSKDLNNKVVALFDSLPQIWANDATTDAHRKALLRCLVEKVVLDRGERDVALARIVWRGGAVTDLHVKMKVNSVAKLTRGEELRARLLELALTGVPDDQIAEILTREGHHSPNCEDKVLPITVQRLRLAAGIKAKAQRNRWTHEPTLLSAVQLAARLDIPVNWIYVQIRRKRLLIDQQSTGAYLFQNSPAIVNAVRDLRNRTINHLDLRIIQPHQEGHQHA

SEQ ID NO: 3256 - protein, 695 aa, Artificial Sequence
  Description of Artificial Sequence: Synthetic polypeptide
MMSELIKPTHLARKAVVYIRQSTPHQVVSNQESLRLQYALRQRARDLGWHEADIDVIDADLGLSGASATQRGGFKELVGRVGLSEVGLILSIDVTRLARNCSDWYPLLDICGLRGCLIADRDGVYDPGSPNGRLLLGLKGTISELELHTIRSRLTAGLLAKAARGELALNLPVGLVRDPSGVVTKDPNIEVQERLERVFDTFLKFRTVAKVMRVFNQRNLDLPRRDRHGDLRWTRATISAIAKILGNPAYAGAFVYGRTRTCHGTCESGLPSKAPRPIDQWRIVVKDRYPAYIDWPTYEKIRTIVADNRAEYMRTKTRGAPRDGELLLHGIAWCARCGHKMYVRYKGGGEYVCNHLRTHEGLPTCQHVRAPKVDAAVAEAFLTALAPAELDALSRAGRAQHQLDTALRTSAEHQLERKRYAAALAERQFNRVDPDNRLVAGELERRWEAALIEVRTAEEALARQSALHSLPQRVIGKDLGDKVIALAGRLPQIWADPTTTDAQRKALLRCLVDKVALDRGQRDVVLVRIVWRGGAISDLMVKMKVNSVAKLSQGQEMRGRVLDLARAGALDDDIAATLTAEGHRSPNCEDRVLPITVQRLRLAAGMKVAAQRTRWTHDVGNLSATELADVLGIPVNWLYVQIRKERLLIDRQPNGAYLFQNTPDVIQAVRELWNHSVNQLDLRICQPHQEGHQHA

SEQ ID NO: 3257 - protein, 694 aa, Artificial Sequence
  Description of Artificial Sequence: Synthetic polypeptide
MSTNSAQKVTSEHLRRDAFLYVRQSSLRQVFENTESTKRQYALRDRAVSLGWPIERIHVVDNDLGMSGSSAKERDGFQHLVAEVANGHAGIVLGLEVSRLARNNADWHRLIELASLTQTLILDEDGIYDPGQFNDRLLLGLKGAMSEAELHILKGRLQGGIKNKARRGELEVPLPIGLVYHPNGSVALDPDQQVRGALQLLFDTFRQAASATATVRRFRQEGWLFPRRIRRGIGKGDLLWGPLEHCRVIQILHNPRYAGAFVYGRTRGAYRPGRKSTSLKVARENWQVLIQNSHPGFIDWDEFERNQATLKQNLTGFGLDRRGSMPREGVGLLQGRVVCGACGARMRVRYQEVDNKLQPYYMCTENPVRRAGKPCQSVRGSAIDDAIGSLLLESVAPAVLEVALAVEDEISGRVKQAAAQRQKQLVRARYDAELARRRYMSVDPTNRLVADSLEADWNERLRVLDALQQENERLQHADHKLLSSDARTQIRALAEDFPRVWNDQRVVPVERKRMIALLIEDVTLVKAERIAIHVRFRGGRTTSLEIDKPKPIALIRKTLPEVVAKVDELLETCSDRQVAEQLNALGYTNWKGESFTHKKVSIVRTAYRLKSRFERLRARGMVTANELAKQLGVCPTTIYLWGQRGVVHQHRYGNLHRCLYEPLGDVVLVKGQGGRYSSTEPTFIPVPSTTQGAV

SEQ ID NO: 3258 - protein, 694 aa, Artificial Sequence
  Description of Artificial Sequence: Synthetic polypeptide
MFTETHQKVTADHLSRDAFLYVRQSSLRQVFENTESTKRQYALRERASALGWPIERIHVIDSDLGRSGASAEGRDGFQQLVSEVAIGHAGIVLGLEVSRLARNNADWHRLIELAALSHTLILDEDGIYDPAHFNDRLLLGLKGTMSEAELHVLRARLQGGIRNKARRGELELALPIGLVYGADGSVVLDPDRQIQDTLRLLFVSFAECGSASAVVRRFQREGWAFPRRIRGGIGKGELLWATLDHSRAVQILHNPRYAGAFVYGRTRGGRNAQLKSVQHKVAREQWHVLIRDAHVGYIDWEEYERNQATLKQNVGGFGEASRGRVPREGTGLLQGRVVCGLCGARMRVRYQEVEGRLEPYYQCTDAVVRRAGKLCQSVRGRPIDEAISALLLESVAPAAIEVALAVQEEIAGRLEQAETLRASQLERARYEAELARRRYLKVDPDNRLVADALEADWNARLRQLDALQREHERQRAADQGLLGEEARGRILALAKEFRHVWNDPRTEPIERKRMMALLIEDVTLVKADRVSIHVRFRGGKTRSLLIDKPKPIAQIRKTSPQVVQTVDELLETCTDRQVAARLNELGYRNWQGQSFTFKKVIVLRNAYHLKSRFERLRERGMRTGDELAKQLDVCPTTIHQWGRQGLLRRHLYGNNHRCLYEPVGEVLVTKGAGGRYGSRSPTLIAVSSTTQGAI

SEQ ID NO: 3259 - protein, 694 aa, Artificial Sequence
  Description of Artificial Sequence: Synthetic polypeptide
MSTDNAMKISADHLRRDAFLYVRQSSLRQVFENTESTKRQYALRDRAVALGWPIERVHVIDNDLGLSGAQSQDRDGFQRLVSEVAMGHAGIVLGLEVSRLARNNADWHRLLELAAMSRTLIMDEDGVYDAASFNDRMLLGLKGTMSEAELHILKSRLQGGILNKARRGELELPLPIGFVYTPDTRVVLDPDRQIQDTVRMLFDTFREAGSACAVVRRLRSEKILFPRRIRRGLGKGDVLWSEIDHSRLLQILHNPRYAGAFAYGRTRTVYNAKLKSVQQKMPRSDWQVLIPQAHEGYISWDEFERNQSSLEQNAVGFSPGLRGRMPRQGSGLLQGRVLCGRCGARMRVHYEQFEDKLRPYYVCNEAVVRHAGKTCQWARGPAIDEAVSALLLEAMAPTAIEVALAVQQEISQRVEQAASLRDKQLQRARYEAELARRRYLKVDSDNRLVADALEADWNGKLRDLDALQREHERQNETDQSLLDGAAQERIRALAADFPSVWSNERTSVVERKRMLGLLIEDVTLLVDEQINMHIRWRGGRTQSLTVARPRPMAVIRKTPEAVVALINELLETDNDQQIASRLNALGHRNWRGEPFTLKKVMIVRRAYGLKTRFERLRESGMLTGEEVARQLGVSATTIHQLGRDGVLKRHRYATNHRYLYEPPGNVRLEKGIGGRYGSRQPRLIDAQPTQQGAS

SEQ ID NO: 3260 - protein, 694 aa, Artificial Sequence
  Description of Artificial Sequence: Synthetic polypeptide
MSTNSALKVTAEHLRRDAFLYVRQSSLRQVFENTESTKRQYALRDRAVSLGWPIERIHVVDNDLGMSGSSTQGRDGFQHLVAEVANGHAGIVLGLEVSRLARNNADWHRLIELASLTQTLICDEDGIYDPGQFNDRLLLGLKGAMSEAELHVLKGRLQGGIKNKARRGELEVPLPIGLVYHPNGSVVLDPDQQVRGALQLLFDTFRQAASATATVKRFRQEGWLFPRRIRRGIGKGDLIWGPLEHCRVIQILHNPRYAGAFVYGRTRGAYRQGRKSFGLKVDRENWQVLIQNAHPGFIDWDEFERNQATLKQNLTGFGRDRRGSMPREGVGLLQGRVVCGLCGARMRVRYQVVGNKLEPYYMCTENPVRRASKPCQSVRGSAIDDTIGSLLLESVAPAALEVALAVEDEISGRVKQAADQRQNQLARARYDAELARRRYMSVDPTNRLVADTLEADWNERLRVLDGLQQENERLQKADHKLLSSDARTKIQSLAEDFPRVWNDQRVVPLERKRMVALLIEDVTLVKSERVAIHVRFRGGRTTSLEIDKPKPIALIRKTLPEVVAKIDELLETGSDRQVAEQLNALGYTNWKGETFTHKKVYLVRTAYRLKSRFERLRERGMVTANELAAQLGVCPTSIHLWARRGLLRQHRYGNLHRCLYEPVGDVVLVKGQGGRYSSTQPTFIAVPPTAQGAV

SEQ ID NO: 3261 - protein, 694 aa, Artificial Sequence
  Description of Artificial Sequence: Synthetic polypeptide
MSTDNAMKISADHLRRDAFLYVRQSSLRQVFENTESTKRQYALRDRAVALGWPIERVHVIDNDLGLSGAQSQDRDGFQRLVTEVAMGHAGIVLGLEVSRLARNNADWHRLLELAAMSRTLIMDEDGVYDAASFNDRILLGLKGTMSEAELHILKSRLQGGILNKARRGELELPLPIGLVYTPDMRVVLDPDRQIQDTVRMLFDTFREVGSACAVVRRLRSEKILFPRRIRRGIGKGDVLWSAIDHSRVIQILHNPRYAGAFAYGRTRTIYNAKLKSVQQKMPRSDWQVLIPQAHEGYISWDEFERNQTSLEQNAVGFSPGLRGRMPRQGNGLLQGRVLCGRCGARMRVHYEQFEGNLRPYYICNEAVVRHAGKVCQWARGPAIDEAVSALLLEAMAPTAIEVALAVQEEISQRVEQAASLRDKQLQRARYEAELARRRYLKVDPDNRLVADALEADWNGKLRDLDTLQREHERQNDTDQSLLDGAMQERIRALAADFPRIWNNERTSPVERKRMLGLLIEDVTLLVDEQINMHIRWRGGRTQSLAVARPRPMAVIRKTPEAVVALINELLETDNDQQIASRLNALGHRNWRGEAFTLKKVMLVRRAYGLKTRFERLRESGMLTGEEVARRFGVSATTVHQLGRDGVLKRHRYATNHRYLYEPPGNVRLAKGVGGRYGSRQPRLMDAQQIQQGAS

SEQ ID NO: 3262 - protein, 694 aa, Artificial Sequence
  Description of Artificial Sequence: Synthetic polypeptide
MSTDIAIKVDADHLRRDAFLYVRQSSLRQVFENTESTKRQYALRDRAVALGWPIERVHVIDSDLGLSGAQSQDRDGFQHLVSEVAMGHAGIVLGLEVSRLARNNADWHRLLELAALSRTLIMDEDGVYDPAYFNDRMLLGLKGTMSEAELHILKSRLQGGILNKARRGELEMPLPIGLVYTPDARVVLDPDRQIQDTVRLLFDTFRQTGSACAVVRRLRGEKILFPRRIRRGIGKGDVLWNEIDHSRVLQILHNPRYAGAFAYGRTRTAYNAKLKPVQLRVARSDWQVLIPDAHDGYISWAEYERNQAALEQNATGFSPGLRGRMPRQGSGLLQGRLLCGRCGARMRVHYEPFEGRLRPYYVCNEAVVRHAGKHCQWVRGAPVDEAVSALLLEVMAPAAIDVALAVQQEITQRVEQAAALRGTQLQRARYEAELARRRYLKVDPDNRLVADALEADWNARLRDLDALQREHERQNEADHSLLDEPAQQRIRALTADFPRIWNDERTGAVERKRMLGLLIEDVTLLVDDEVNINIRWRGGRTQSLSVARPRPMSVIRKTPAQVVALINELLEATNDRQIAARLNELGHRNWRGEPFTPKKVMLVRRTYGLKSRYERLREGGMLTGEEVAQQLGVCESTVHQLGRKGTLKRHRYASNHRYLYEPPGNVRLEKGAGSRYGGRQPRLIVAQPLQQGAS

SEQ ID NO: 3263 - protein, 694 aa, Artificial Sequence
  Description of Artificial Sequence: Synthetic polypeptide
MSTDNAMKISADHLRRDAFLYVRQSSLRQVFENTESTKRQYALRDRAVALGWPIERVHVIDNDLGLSGAQSQDRDGFQRLVTEVAMGHAGIVLGLEVSRLARNNADWHRLLELAAMSRTLIMDEDGVYDAASFNDRMLLGLKGTMSEAELHILKSRLQGGILNKARRGELELPLPIGLVYTPDMRVVLDPDRQIQDTVRMLFDTFREVGSACAVVRRLRSEKILFPRRIRRGIGKGDVLWSEIDHSRVIQILHNPRYAGAFAYGRTRTIYNAKLKSVQQKMPRSDWQVLIPQAHEGYISWDEFERNQTSLEQNAVGFSPGLRGRMPRQGNGLLQGRVLCGRCGARMRVHYEQFEGNLRPYYICNEAVVRHAGKACQWARGPAIDEAVSALLLEAMAPTAIEVALAVQEEISQRVEQAASLRDKQLQRARYEAELARRRYLKVDPDNRLVADALEADWNGKLRDLDTLQREHERQNETDQSLLDGAMQERIRALAADFPRIWNNERTSPVERKRMLGLLIEDVTLLVDEQINMHIRWRGGRTQSLAVARPRPMAVIRKTPEAVVALINELLETDNDQQIASRLNALGHRNWRGEAFTLKKVMLVRRAYGLKTRFERLRESGMLTGEEVARRFGVSATTVHQLGRDGVLKRHRYATNHRYLYEPPGNVRLAKGVGGRYGSRQPRLIDAQQIQQGAS

SEQ ID NO: 3264 - protein, 694 aa, Artificial Sequence
  Description of Artificial Sequence: Synthetic polypeptide
MSTDNAMKISADHLRRDAFLYVRQSSLRQVFENTESTKRQYALRDRAVALGWPIERVHVIDNDLGLSGAQSQERDGFQRLVTEVAMGHAGIVLGLEVSRLARNNADWHRLLELAAMSRTLIMDEDGVYDAASFNDRMLLGLKGTMSEAELHILKSRLQGGILNKARRGELELPLPIGLVYTPDMRVVLDPDRQIQDTVRMLFDTFREVGSACAVVRRLRNEKILFPRRIRRGIGKGDVLWSEIDHSRVIQILHNPRYAGAFAYGRTRTIYNAKLKSVQQKMPRSDWQVLIPQAHEGYISWDEFERNQTSLEQNAVGFSPGLRGRMPRQGNGLLQGRVLCGRCGARMRVHYEQFEGNLRPYYICNEAVVRHAGKACQWARGPAIDEAVSALLLEAMAPTAIEVALAVQEEISQRVEQAASLRDKQLQRARYEAELARRRYLKVDPDNRLVADALEADWNGKLRDLDTLQREHERQNETDQSLLDGAMQERIRALAADFPRIWNNKRTSPVERKRMLGLLIEDVTLLVDEQINMHIRWRGGRTQSLAVARPRPMAVIRKTPEAVVALINELLETDNDQQIASRLNALGHRNWRGEAFTLKKVMLVRRAYGLKTRFERLRESGMLTGEEVARRFGVSATTVHQLGRDGVLKRHRYATNHRYLYEPPGNVRLAKGVGGRYGSRQPRLMDAQQIQQGAS

SEQ ID NO: 3265 - protein, 694 aa, Artificial Sequence
  Description of Artificial Sequence: Synthetic polypeptide
MSTDNAMKISADHLRRDAFLYVRQSSLRQVFENTESTKRQYALRDRAVALGWPIERVHVIDNDLGLSGAQSQDRDGFQRLVTEVAMGHAGIVLGLEVSRLARNNADWHRLLELAAMSRTLIMDEDGVYDAASFNDRMLLGLKGTMSEAELHILKSRLQGGILNKARRGELELPLPIGLVYTPDMRVVLDPDRQIQDTVRMLFDTFREVGSACAVVRRLRSEKILFPRRIRRGIGKGDVLWSEIDHSRVIQILHNPRYAGAFAYGRTRTIYNAKLKSVQQKMPRSDWQVLIPQAHEGYISWDEFERNQTSLEQNAVGFSPGLRGRMPRQGNGLLQGRVLCGRCGARMRVHYEQFEGNLRPYYICNEAVVRHAGKACQWARGPAIDEAVSALLLEAMAPTAIEVALAVQEEISQRVEQAASLRDKQLQRARYEAELARRRYLKVDPDNRLVADALEADWNGKLRDLDTLQREHERQNETDQSLLDGAMQERIRALAADFPGIWNNERTSPVERKRMLGLLIEDVTLLVDEQINMHIRWRGGRTQSLAVARPRPMAVIRKTPEAVVALINELLETDNDQQIASRLNALGHRNWRGEAFTLKKVMLVRRAYGLKTRFERLRESGMLTGEEVARRFGVSATTVHQLGRDGVLKRHRYATNHRYLYEPPGNVRLAKGVGGRYGSRKPRLIDAQPIQQGAS

SEQ ID NO: 3266 - protein, 694 aa, Artificial Sequence
  Description of Artificial Sequence: Synthetic polypeptide
MSTDNAMKISADHLRRDAFLYVRQSSLRQVFENTESTKRQYALRDRAVALGWPIERVHVIDNDLGLSGAQSQDRDGFQRLVSEVAMGHAGIVLGLEVSRLARNNADWHRLLELAAMSRTLIMDEDGIYDAASFNDRMLLGLKGTMSEAELHILKSRLQGGILNKARRGELELPLPIGFVYTPDTRVVLDPDRQIQDTVRMLFDTFREAGSACAVVRRLRSEKILFPRRIRRGIGKGDVLWSEIDHSRLLQILHNPRYAGAFAYGRTRTVYNAKLKSVQQKMPRSDWQVLIPQAHEGYISWDEFERNQTSLEQNAVGFSPGLRGRMPRQGNGLLQGRVLCGRCGARMRVHYEQFEGNLRPYYICNEAVVRHAGKACQWARGPAIDEAVSALLLEAMAPTAIEVALAVQEEISQRVEQAASLRDKQLQRARYEAELARRRYLKVDPDNRLVADALEADWNGKLRDLDALQREHERQNETDQSLLDGAMQERIRALAADFPGIWNNERTSVVERKRMLGLLIEDVTLLVDEQINMHIRWRGGRTQSLAVTRPRPMAVIRKTPETVVALINELLETDNDQQIASRLNTLGHRNWRGEPFTLKKVMLVRRAYGLKTRFERLRESGMLTGEEVAHRLGVSATTVHQLGRDGVLKRHRYATNHRYLYEPPGNVRLAKGVGGRYGSRKPRLIDAQPIQQGAS

SEQ ID NO: 3267 - protein, 693 aa, Artificial Sequence
  Description of Artificial Sequence: Synthetic polypeptide
MSTERYQKVTHDHLRRDAFLYVRQSSLRQVFENTESTKRQYALRERAVSLGWPIERIHVIDTDLGLSGASAEHRDGFQQLVSEVAIGHAGIVLGLEVSRLARNNADWHRLIELAALTHTLILDEDGVYDPAYFNDRLLLGLKGTMSEAELHVLNARLQGGMRNKARRGELELPLPVGLVYHPNGSVVLDPDQQIHASLRLLFDTYRQTHSASMVVRRFRREGWSFPRRIRRGIGKGEVHWGALNTSRVLQILHNPRYAGAFVYGRTRIGRKADLTSTQLKVAQSDWQVLIRDAHIGYIDWDEFERNQVTLRQSANGFGSLVRGTVPREGDGLLQGRVICGICGNRMRVRYQKVSDRMEPYYVCHDVAAHDAGKPCQSIRGRAIDDAISALLLETVGPATIEVALAVEDEIAGRIEQADSMRLKQLERARYEAELARRRYMNVDPANRMVADALEADWNDRLRRLDVLQQEHDRQRRSDQDLLGDEARARIRALADDFAAVWNDRRVESIERKRMLGLLIEDVTLVKSEKVSIHVRFRGGRTTSLAVDNPRPMALVRKTLPAVVTVIDELLETCTDQQVATRLNELGYTNWQQQAFTARKVALVRTTYGLPSRFERLRSRGLLTGAELAAQFKVSQTTIHQWGRQGLLRRQVYGHDHRCLYEPPGNVLLVRGAGGRKATQATFIAAPTTGQGAM

SEQ ID NO: 3268 - protein, 692 aa, Artificial Sequence
  Description of Artificial Sequence: Synthetic polypeptide
MMGEQHAKIQARHLKRNAYLYVRQSTLRQVLENSESTKRQYDLRERALALGWRLDQVVVIDSDLGQSGASAVDREGFQRLVSEVGLGRAGIVMGLEVSRLARNSTDWHRLLEICALADTLILDEDGVYDPAHFNDRLLLGLKGTMSEAELHVLQARLRGGILNKARRGELEIRLPIGFDYDPAGRVRLDPDVRVQESLRQFFRTFRRTGSATATVKAFRAEGLSFPHRIYRGPQTGELLWTDLEHSRALWLLHHPRYTGAFCFGRTRVRKQPDGSHRHQRLPSEEWIALIRDAHAGYITWDEYEENLRILRDNAQAPATGRDRGTPREGPALLQGLALCAKCGDRMTVRYHVNGTRRVPDYVCQREGVEHAQPICQQIVGGELDAAIGRLLVEVVTPITLGVALAVQKELESRSEDSDRLRRQAVERARYESDLARRRYMRCDPDNRLVADSLEVEWNQALRNQTAAQEHYDKQRESETGLDDQQRAAILALAKDFPRLWNDPHTADRERKRMARLLIADVTLLKEADIRAQVRFSGGATHTLHLPLPKPAWMLRQTPGTVVAEIDRLLEDHTDSEIADWLNDQGLISGDGKPFHRPMVRRIRIDYALPSRHDRLRARGLLTLHEMAQRLNICPDSLKRWRRAGLLKAHKYDDRGGYLFEPPGPDTPVKHQHQGKTTGKSTTREGSFPAHTA

SEQ ID NO: 3269 - protein, 692 aa, Artificial Sequence
  Description of Artificial Sequence: Synthetic polypeptide
MTNADRLPAPLLQRKAVVYVRQSTQAQVQMNLESQRRQYELVGEAKRRGFRDIEVIDDDLGRSASGTVARPGFERLVALLCAGEVGAVLCLDASRLARNGRDWHHLLELCGLVEARVIDLDGVYDPCRPNDRLLLGMKGSISEFELNVLRTRMLDAARSKAQRGELRISVPIGYLWHRDVGLGLDPNQRLQEVIRMIFTRFRELGSARQAFLSLQAEQIHFPRPTDGRTLTHFDWTLIRYRNVISVLRNPFYAGAYAYGKSGKQTTIVDGRAHKTYKHRKPFEEWEVLLKEHHEGYIDWAEFERNQKLLAANAYGKAGDVKSGRGGRALLAGLLGCARCGRRLSVAYTGRTPRPVYRCYRFDLPPKCMSFGGSRIDAAIARELMRVVEPVAIEAALQAEQMLMDTLSEQRRIIELELQQAQYEATLAERRYAACDPDNRLIAAQLEKNWEAALRRVQACQARLETTRTSAAPIAAPDFTKLAEDLDAAWNAPGVTMRMRQQLVRVLIVDIVADVNESTREVILTIHWQGGQHSQVRIRKPKTGEHGCSTSDEALAVMRSMATRWSDQDIAASLNRMGIRTGQGKTWTAHRVSSVRRVRNIYAYKSAEKDGDWLTMSEAAKALGVTHYMIRRLINDKVLPAEQVMPDAPWQIRASDLRSEAVTAALTRKHRPCRNDVEGQLPMFTEVSEGGAQ

SEQ ID NO: 3270 - protein, 692 aa, Artificial Sequence
  Description of Artificial Sequence: Synthetic polypeptide
MNSKVRTTHLERHAVVYLRQSTPTQVEFHRESTERQYALADRALTLGWDKSQIEVLDSDLGKSGQTTTGREDFHRLMAAVGLGEVGAVLALEASRFSRSQADWHKLLDICALTDTLVIDHDGIYDPNDFNDRVILGFKGTWSHTELHGMRLRLQGAKLNKAKKGELRCSPPTGYVYDPEGKLVLDPDEGVVAAIQLAFQQFRELRTAFKVMRYFCVNQIPFPRRRWRPGDIGTLHWGPANLSRITALLHNPTYTGTYVYGRRRSFNVIEGGQIKKVKIQQLPQEEWKVIIHNAHEAYISWSEYLSNCERLRQNSPVSLSDGCPSTPREGFALLQGLVICGKCGRRMSPRYHGTGGCRAAYECSQARKQDGSMGVCWTVAGAAIDTAVAEQVLEAFTSEQLDISLAVLSELENQAFEIDKTWQLRLERARYEADRAFRQYDATEPENRLVARTLERRWNEKLQQLAELEEAYQKARLVQRLELTAAQRQQILQLANDIPTLWHASTTTNLERKEILGLLVKQVAITPIDAPERSTRVQILWHTGATSCFVATRPTNAEKFRTPKQVIQLIEELAVGRTDSEIAHELNRRGLVGGKGRAFTKKGVAWIRWKFGIEKPLSNPQVAHLGVSPEGYYSTSALAEKLGVGIHTIYYWRDKGIIQAFQETDRSPWWYKVTPEILDTLREKIRRVPVKSE

SEQ ID NO: 3271 - protein, 692 aa, Artificial Sequence
  Description of Artificial Sequence: Synthetic polypeptide
MNNKISSTHLERRAVVYLRQSTPTQVEFNRESTERQYALADRALTLGWDKSQISVLDSDLGKSGQTTTGREDFHRLMAAVGLGEVGAVLALEASRFSRSQADWHKLLDICALTDTLVIDHDGIYDPNDFNDRVILGFKGTWSHTELHGMRLRLQGAKLNKAKKGELRCSPPTGYVYDPEGKLVLDPDEGVVAAIQLAFQKFRELRTAFKVMRYFCVNQIPFPRRRWRPGDIGTLHWGPANLSRITALLHNPTYTGTYVYGRRRSFNVIEGGQIKKVKIQQLPQEEWKVIIHNAHEAYISWSEYLSNCERLRQNSPISLSDGCPGTPREGFALLQGLVICGKCGRRMSPRYHGTGGCRAAYECSQARKLDGSMGVCWSVAGAAIDTAVSAHVLSAFTDEQLDISLAVLSELENIADEADKTWQLRLERARYEAERAGRQYDATEPENRLVARTLEKRWNEKLQQLAELEEAYQKARLVQRLELTAVQRQQILQLANDIPTLWHASTTTNLERKEILGLLVKQVAITPIDAPERSTRVQILWHTGVTSELIATRPTNAEKFRTPNQVIQLIEELAVGRTDSEIAHELNRRGLVGGTGRAFTKKGVAWIRWKFGIEKPLSNPQVAHDGVSPEGYYSTSALAEKLGVGIHTVYYWRDKGIIQAFQETPRSPWWYIVTPEVLETLREKIRRVPVKSE

SEQ ID NO: 3272 - protein, 691 aa, Artificial Sequence
  Description of Artificial Sequence: Synthetic polypeptide
MSKITPVHLARAAFVYIRQSTAYQVVNNLESQRRQYGLVERARQLGWEDVQLVDDDLGRSGGGTVRPGFEKLLSAICEERVGAVVSLEASRLARNGRDWHTLLEFCGLVGTLIVDEEAIYDPRSPNDRLLLGMKGTMSEMELSIFRQRSVEAMRQKARRGELHLTVAVGYVKTDDSRIEKDPDRRVQDGILLVFSKFAELQSIRQVLLWFRQENVLVPAIVQGRGKRPVEWKAPVYHTLHHMLTNPVYAGSYAYGRRGTRVTIKDGRKRIMRDTLRRNWKDWEVLIHDHHEGYIAWTEFERNQHVIADNANGKSYMGRGSIRRGEALLPGLFRCARCGRRLHIQYTGKGGNTQRYACRGAFGTRAADNCIGFGGMRVDRAVAQEVLDRLQPLGIEAALAAMEAQSVHHCDKRKHIENAIQQAQYEAARARRQYDAVDPDNRLVASELERRWNEKLVQLRDLEVQLETLEQTQHTPALSAADRARLMTLGKDLTKAWNSPGASIETRKKIIRLLVKEIIVDVVGDTLALIIHWQGGDHTQLTVKKNKIGQTRWTVEADVLDLIRVLARQLSDTAIAAILNRAGKLTAHGASWTRSHVCSLRNINGIPVYREGERAERAEVTLDEAADILKVSRTTAYRMVSSGTLPARQLCGGAPWIIQLADLQRDAVCREADARRSRRPISRDPQQNLFAL

SEQ ID NO: 3273 - protein, 691 aa, Artificial Sequence
  Description of Artificial Sequence: Synthetic polypeptide
MSKITADHLSLSAFVYVRQSTAYQVANNLESQRRQYGLVERARQLGWETVEIVDDDLGRSGGGIARPGFEKLLAAICEGRVGAVVSLEASRLARNGRDWHTLLEFCGLVGTLIVDEEAIYDPRSPNDRLLLGMKGTMSEMELSVFRQRSVEAMRQKARRGELHLTVAVGYVKTDDARVEKDPDRRVQESILLVFRKFAELQTVRQVLLWFRQENVLVPSVNQGRGKPPIEWKAPVYHTLHHILTNPVYAGSYAYGRRGTRVMIKDGRKRVIRDTLRRNSKDWEVLIHDHHEGYISWAEFERNQHLIAENANGKSYIGRGSIRRGEALLPGLFRCGRCGRRLHIQYSGKGGNTQRYVCRGTFGDMAAANCIGFGGMRVDRAVAQEVLERLQPLGIEAALQAMEAHTQRHSDKRQQLENSIKQAQYEAARARRQYDAVDPDNRLVAGELERRWNEKLIQLRDLEIELETLSTDRDMPALSADDRARLMKLGRDLGQAWDSPSVSIETRKKIIRLLITEIVVDIVDDTLAIIIHWQGGDHTRMTVKKNKIGQTRWAVKADVVDLVRALARQLPDLSIAAILNRSGKRTGHGASWTRSHVCSLRNIHGIPVYREGERAERGERTLDETADILKVSRATAYRMVSSGVLPARQLCAGAPWIIQLSDLQDDTVRREADARRSRRPISQDPVQNPLLF

SEQ ID NO: 3274 - protein, 691 aa, Artificial Sequence
  Description of Artificial Sequence: Synthetic polypeptide
MSKITIDHLALSAFIYVRQSTAYQVANNLESQRRQYSLVERARQLGWETVEIVDDDLGRSGSGTARPGFEKLLAAICEGRVGAVVSLEASRLARNGRDWHTLLEFCGLVGTLIVDEEAIYDPRSPNDRLLLGMKGTMSEMELSVFRQRSVEAMRQKARRGDLHLTVAVGYVKTDDVRVEKDPDRRVQESILLVFRKFAELQTVRQVLLWFRQENVLVPSVLQGRGKRPIEWKAPVYHTLHHILTNPVYAGSYVYGRRATRVMIKDGRKRVTRDTLRRNPKDWDVLIHGHHEGYISWAEFERNQHLIAENTNGKSYMGRGSIRRGEALLPGLFRCGRCGRRLHIQYSGKGGNTQRYVCRGTFGDMAAGNCIGFGGMRVDRAVAQEVLERLQPLGIEAALQAMEAHTQRHSDQHQQLENSIKQAQYEAARARRQYDAVDPDNRLVAGELERRWNEKLIQLRDLELQLQTLTGDRDTPVLSADDRTRLMTLGRDLGKAWDSPNASIETRKKIIRLLIKEIIVDIVDDTLALIIHWQGGDHTRMTVKKNKIGQTRWAVKADLVDLVRALARQLPDLSIAAILNRSGKRTGHGASWTRSHVCNLRNIHGIPVYREGERAERGERTLDETADILKVSRATAYRMVSSGVLPARQLCTGAPWIIQLSDIQDDAVRREADARRSRRPISQDPVQNPLLF

SEQ ID NO: 3275 - protein, 691 aa, Artificial Sequence
  Description of Artificial Sequence: Synthetic polypeptide
MNAFSPLPPALLKRKAVVYVRQSSQSQVMQNLESQRRQYDLVDAARQHGFRRVEVIDDDLGLSASGAVARPGFERLVAWLCAGDVGAVLCFDASRLARNGRDWHHLLELCGLVDARVIDQDGVYNPCSPNDRLLLGMKGTISEFELGIIRARMLDAARAKARRGELRISVPIGYIWYRDAGLGFDPDLRVQEAVRLIFSRFRELRSGRQVLLSLTEDKLCFPRPTDGRNTTTFDWTPIRYRNVISVLKNPFYAGVYAYGKSEKRTEIIDGRARKTYGHGKPKEEWEVFLKDHHDGYIEWDEYERNQALLAANAYGQKGGAKSGRGGRALLSGLLSCGRCGRRLCVAYTGKTPRPVYRCERPNLMLGLNRCLGFGGPRIDKAVAAELLRVVQPMAIEAAMQAEHMQSEARAERRRAAELDLQKAQYEAALAERRYAACDPDNRLIAATLEKNWEVALKRLEACKTRLDAEQLPDTPAKLPDLDGLAEDLQAAWNAPGVSTRARQRLARALIKDIIADVDEEARDVVLTIHWQGGQHSQLRVRKPKTGEHGCNTSEDALEVMRSMAGRWSDSDIAATLNRMGIRTGFGHTWTAHRVSSIRRVNDIHAYFSAEKSGKWLTMTEAATKLGVTNHVIRNLIKAKILPAEQVVPRAPYQIKAVDIEREDIIEAINNRRRKRPYRDPRQIALPINSIT

SEQ ID NO: 3276 - protein, 690 aa, Artificial Sequence
  Description of Artificial Sequence: Synthetic polypeptide
MNTKITPQHQSKPAYIYIRQSTLAQVRHHQESTERQYALKDKALALGWTETAIRTLDRDLGQSGAQMTGREDFKTLVADVSMGQVGAVFALEVSRLARSNLDWHRLLELCALTHTLVIDADGCYDPGDFNDGLLLGLKGTMAQAELHFLHGRLQGGKLNKAQKGELRFPLPVGLCYDDQGRIVLDPDDEVRGAVQLAFRLFQETGSAYAVVKRFAEEGLRFPKRAYGGAWAGRLIWGRLSHERVLGLIRNPSYAGIYVFGRYQYRQRITPRGEVHKRVQPVPKAEWRVHLPDHHDGYITPEEFERNQDRLALNRTNGEGTVLSGAAREGLALLQGLLICGCCGRALTVRYQGNGGLYPLYLCSARRREGLATTDCMSMRSELLDNAIGEAVFTALQPAELELAVTALSELEQRDHAIMRQWHMRIERAEYEVALAERRYQECDPANRLVAGTLERRWNDAMLRLEAIRTEAAQFQSQKALVATSEQKAQVLALARNLPRLWRAPTTSAKDRKRMLRLLIRDITVERRSATRQAVLHIRWQGSACTDITVDLPKPAADAMRYPAAFVERVRELSQHLPDRQIVAHLNQEGIRSSTGKSFTLEMVKWIRYRYRIEVTCFKRPDELTVQQLAHRLHVSPHVVYYWIERQVVQARKLDGRGPWWVTLDAAKERQLKDWVRTSGHLQRQHSNTQL

SEQ ID NO: 3277 - protein, 690 aa, Artificial Sequence
  Description of Artificial Sequence: Synthetic polypeptide
MMHEKIGPHHLERKALLYVRQSSAHQVLHNRESSALQYAMRDRLTVLGWSSIETIDDDLGRSAAGGVTRAGFDRMVAEVCLGKVGAVAAREVSRFARNSRDWQQLIEMCRVVDTVLIDQETVYAPRQSNDRLLLGLKGSLNEYELDLLRQRSLSARYEKARRGELLVAAPVGFMKAGDRLEKDPDRRVQEAITLVFDKVAELGSARQALLWFLEHSLDLPARRANGDVVWRRPTYATIHRMIENPVYGGAYAYGKTRVTPRHDAIVPRSSSRRKRRGDWLALKPGAHEGYVSWERAEAIRTMVSDNIPASRHHGAPKHGDALLAGLLRCRRCGRKLTVRYTGTNHNIPRYSCWRGLLDNGEPRCIAFGGLRVDDAIEEALLRVVEPGAIAAAAAAEAQAAGRRDQVREALVRDLEAARYQADRAFRQYDAADPANRLVAAELETRWNRALAQAAEVEARIAEHDAAAPNSSSLAVLDAARLGTNLRAVWAAPTTDSRLKKRIVRTVIHEVVADIDDTASEIVLLVHWIGGAHTELRLPTRRRGQRNSTASEIIAAVRHLALIASDDLIAGILNRNRLLTGHGNRWTRERVTALRSHHKIQVFRPAPDGIEPQLNLTDAARLLGVAPKTLRLAAEAGVIEGDHPLPDGPWIFRRSELAKPAAAQITHRARQNPKHPAGSHPDQKNLSLSTT

SEQ ID NO: 3278 - protein, 690 aa, Artificial Sequence
  Description of Artificial Sequence: Synthetic polypeptide
MTGTDLIPAQLLKRKAVVYVRQSTQSQVMTNLESQRRQYDLVDSARQHGFTDIEVIDDDLGRSASGTVARPGFDRLVASLCAGKVGAVLCLDASRLARNGRDWHHLLELCGLVEARVIDHDGVYNPCQPNDRLLLGMKGSISEFELGVLRTRMLDAARSKARRGELRLSVPFGYIWHREAGLGLDPDLRLQEVIRLIFARFRELGSARQVLLSMKADGIHFPRPSDEGRMTSFTWLPIRYRNVIAVLKNPFYAGVYVYGKSEKRTTIVDGRARRSYGHGKPVGTWEVFIKEHHEGYVSWEEYERNQKQLALNNYGRAGGVKSGRGGKALLSGIMTCGRCGRRLSVAYTGNPQSRPVYRCDKPNLMMGLPRCMTFGGLRVDAAVARELLRAVEPLAIEAAFEAERMNRERQEEQRQILDLELQQARYEASLAERRYAACDPDNRLIAAQLEKNWEIALRRVRDLKARQPAEGPSTIEADPNAFANLAENLSAAWNAPDVTMRARQQMLRTMIADIVVDVDDAVRDVVLTIHWRGGQHSELRVRKPKAGEHGCATAEDALEVMRSMAGRWSDEHIAATLNRMGLPTGQGKTWTAHRVYSVRRVRGIDAYRSAVKDGEWLTMTEAAKALGTSSHTIRLLIKTGVLPAVQVVPRAPHQIRSADLMSEAVKSAMARKGRPCRVVDADMLPMFTDT

SEQ ID NO: 3279 - protein, 690 aa, Artificial Sequence
  Description of Artificial Sequence: Synthetic polypeptide
MNTKITPQHQSKPAYIYIRQSTLAQVRHHQESTERQYALRDQALALGWPQTSIRILDRDLGQSGAQMTGREDFKTLVADVSMGHVGAVFALEVSRLARSNLDWHRLLELCALTGTLVVDADGCYDPGDFNDGLLLGLKGTMAQAELHFLRGRLQGGKLNKAQKGELRFPLPVGLCYDDEGHIVLDPDDEVRGAVQLAFRLFHETGSAYAVVKRFAEGGLRFPKRAYGGAWAGRLIWGRLRHERVIGLIKNPSYAGIYVFGRYQYRQRITPQGEVHKRVQPVPKADWRVHLPEHHEGYITPEEFERNQARLAGNRTNGEGTVLSGPAREGLALLQGLLLCGCCGRALTVRYQGNGGIYPLYLCNAQRRQGLATRDCMNVRSDLLDNAIGAEVLKALRPTELELALTALNELEQRDQAIMRQWHMRIERAEYEVALAERRYQECDPANRLVAGTLERRWNDAMLRLEAIKAEAAQVQSQKARVATPEQKTQVLALARNLPRLWRAQTTPAKDRKRMLRLLIRDITVEKLTATRQAILHIRWQGGACTDITVNLPKPVAEAMRYPAALVEKVRQLSQHLSDPQIVARLNQEGLRSASGRPFTLSMVKWIRYRYQIASVSLKRGDELTVQQLARRLAVSAHVVYYWIKRKVVQARQLDGRGPWWITLDPAKERQLRDWVRTSGHLQPQHSNIQL

SEQ ID NO: 3280 - protein, 690 aa, Artificial Sequence
  Description of Artificial Sequence: Synthetic polypeptide
MICEKIGPQHLDRKAILYVRQSSAHQVLHNRESSALQYAMRDRLTALGWSQIETVDDDLGRSAAGGVTRAGFDRMVAEVCLGKVGAVAAREVSRFARNSRDWQQLIEMCRVVDTVLIDQETVYAPRQGNDRLLLGLKGSLNEYELDLLRQRSLSARYEKARRGELIVAAPVGFVKAGDRIEKDPDRRIQEAITLVFDKVGELGSARQALLWFIEHGLDLPAKRNNGDVVWRRPSYATIHRMIENPIYGGAYAYGKSRAATGYDGTTMRSRSRRKARDEWLALIPGSHEGYVSWERSEDIRKMVSDNVPTSRHHGAAKHGDALLAGLIRCRRCGRKLTVRYTGAGHDIPRYSCWRGLLDNGEPRCIAFGGLRVDDAIEQLLLQVLEPGAIAASVEAEAQAAGRRDQVRDVLMRDLEAARYAADRAFRQYDAADPQNRLVASELEARWNRALTRVGDVEARIVAHDASATHPPLPPLKDIDDLAGELEAVWNAPHSDTRVKKRIVRTLIQEVIADIDDDVSEIVLLIHWVGGIHTDLRLPKRRKGQRNSTSADIIAAVRELVLIANDDLIAGILNRNGLVTGHGNRWTRERVTALRSHHRIPVFRTVTDGPAPWLNLSQAARHVGVAPKTLRIAAEACEIEGIHPLPEGPWIFSRTELDGSAAHHLAKRARQNPKYPTGSHPSQRSLFSSTT

SEQ ID NO: 3281 - protein, 690 aa, Artificial Sequence
  Description of Artificial Sequence: Synthetic polypeptide
MTKSDLIPTVLLRRKAVVYVRQSTQSQVMTNLESQRRQYDLVDLARQHGFADIEVIDDDLGRSASGTVARPGFDRLVAWLCAGKVGAVLCLDASRLARNGRDWHHLLELCGLVEARVIDHDGVYNPCQPNDRLVLGMKGSISEFELGVLRTRMLEAAKSKARRGELRLSVPFGYIWHREAGLGLDPDLRLQEVIRLIFARFRELGSARQVLLSMTADQIHFPRPSDEGRMTSFTWLPIRYRNVIGVLKNPFYAGVYVYGKSEKRTSIVDGRARRSYGHGKPVGTWEVFIKDHHEGYVSWEEYERNQKQLALNNYGRADGVKSGRGGKALLSGVMTCGRCGRRLSVAYTGNPQSRPVYRCDKPNLMMGLPRCMTFGGPRVDAAVARELLRAVEPLAIEAAFEAERMHRERQDDQRQILDLELKQARYEAGLAERRYAACDPDNRLIAAQLERNWEIALRRVQDLEARQPAGTPSTIEVDQGAFANMAENLSAAWNTPDVTMRARQQLLRTLIADIIVDVDDTVRDVVLTIHWRGGQHSELRVRKPRTGEHGCATAEDALAVMRSMAGRWSDEHIAASLNRMGLPTGQGKTWTAHRVSSVRRVRGIHAYRSAEKDGEWLTMTEAAMALGVTNHAIRRLIKTGVLPAVQVVPGAPYQIRADDLASEPIKTAMARKGRPCRAADAGTLPMFTDT

SEQ ID NO: 3282 - protein, 690 aa, Artificial Sequence
  Description of Artificial Sequence: Synthetic polypeptide
MTKSDLIPTVLLRRKAVVYVRQSTQSQVMTNLESQRRQYDLVDLARQHGFADIEVIDDDLGRSASGTVARPGFDRLVAWLCAGKVGAVLCLDASRLARNGRDWHHLLELCGLVEARVIDHDGVYNPCQPNDRLVLGMKGSISEFELGVLRTRMLEAAKSKARRGELRLSVPFGYIWHREAGLGLDPDLRLQEVIRLIFARFRELGSARQVLLSMTADQIHFPRPSDEGRMTSFTWLPIRYRNVIGVLKNPFYAGVYVYGKSEKRTSIVDGRARRSYGHGKPVGTWEVFIKDHHEGYVSWEEYERNQKQLALNNYGRADGVKSGRGGKALLSGVMTCGRCGRRLSVAYTGNPQSRPVYRCDKPNLMMGLPRCMTFGGPRVDAAVARELLRAVEPLAIEAAFEAERMHRERQDDQRQILDLELKQARYEAGLAERRYAACDPDNRLIAAQLERNWEIALRRVQDLEARQPAGTPSTIEVDQGAFANMAENLSAAWNTPDVTMRARQQLLRTLIADIIVDVDDTVRDVVLTIHWRGGQHSELRVRKPRTGEHGCATAEDALAVMRSMAGRWSDEHIAASLNRMGLPTGQGKTWTAHRVSSVRRVRGIHAYRSAEKDGEWLTMTEAAMALGVTNHAIRRLIKTGVLPAVQVVPGAPYQIRADDLASEPIKAAMARKGRPCRAADAGTLPMFTDT

SEQ ID NO: 3283 - protein, 690 aa, Artificial Sequence
  Description of Artificial Sequence: Synthetic polypeptide
MISEKIGPQHLERKAILYVRQSSVHQVLHNRESSTLQYAMRGRLTAMGWSHIETIDDDLGRSAAGGVTRAGFDRMVAEVCLGKVGAVAAREVSRFARNSRDWQQLIEMCRVVDTVLIDQETVYAPRQGNDRLLLGLKGSLNEYELDLLRQRSLSARYEKARRGELVVAAPVGFVKAGDRIEKDPDRRVQEAIALVFDKVAELGSARQALLWFIEHGLDLPAKRNNGDVVWRRPSYATIHRMIENPIYGGAYAYGKSRAATGYDGTAMRSRSRRKARDEWLALIPGSHEGYVSWERSEDIRKMVSDNVPTSQHHGAPKHGDALLAGLIRCRRCGRKLTVRYTGAKHDIPRYSCWRGLLDNGEPRCIAFGGLRVDDAIERALLQVLEPGAIAASVEAEAQAADRRDQVRDVLMRDLEAARYAADRAFRQYDAADPQNRLVAAELETRWNRALTRAGEVEARIVAHDASTAHPALPSLKDIDGLASDLEAVWNAPQSDARLKKRIVRTLIQEVVADIDHDASEIVLLIHWVGGVHTDLRLPRRRKGQRNSTSADIIAAVRELVLIANDDLIAGILNRNGLVTGHGNRWTRERVTALRSHHRIPVFRTVADGPAPWLNLSQAARHIGVASKTLRIAAEAGEIKGIHPLPEGPWIFCRTELDGSAAHHLAKRARQNPKYPTGSHPDQQTLFSSTT

SEQ ID NO: 3284 - protein, 690 aa, Artificial Sequence
  Description of Artificial Sequence: Synthetic polypeptide
MTSTDLIPTALLKRKAVVYVRQSTQSQVMTNLESQRRQYDLVDIARQRGFADIEVIDDDLGRSASGTVARPGFDRLVAWLCAGKIGAVLCLDASRLARNGRDWHHLLELCGLVEARVIDHDGVYNPCLPNDRLLLGMKGSISEFELGVLKARMLEAARSKARRGELRLSVPFGYIWHREAGLGLDPDIRLQEVIRLIFARFRELGSARQVLLSITADQIHFPRPSDEGRMTSFVWLPIRYRNVIAVLKNPFYAGVYVYGKSEKRTSIVDGRARRSYGHGKPVGTWEVMIKGHHEGYISWDEYERNQKQLALNNYGRAGGVKSGRGGKALLSGIMTCARCGRRLSVAYTGNPQSRPVYRCDKPNLMMGLPRCMTFGGPRVDAAVARELLRAVEPLAIEAAFEAERMHRERQDDQRQILDLELQQARYEANLAERRYAACDPDNRLIAAQLEKCWETTLRRLRDLETRQPTGRPPAIEVDPSAFANMAENLSAAWNGPDVTMRARQQLLRTLIADIIVDVDDAVRDVVLMIHWRGGQHSELRVRKPRAGEHGCATTEDALAVMRSMAGRWSDEHIAASLNRMGLPTGQGKTWTAHRVSSVRRVRGIHAYRSAEKDGEWLTMTEAAKALGVTNHAIRRLIKTGVLPAAQVVPGAPYQIRADDLASGSIKTAVARKGRPCRVADVDTLPMFTDT

SEQ ID NO: 3285 - protein, 690 aa, Artificial Sequence
  Description of Artificial Sequence: Synthetic polypeptide
MSNTDLIPTALLARKAIVYVRQSSQSQVMTNLESQRRQYDLVDVARQHGFSDIETIDDDLGRSASGTVARPGFDRLVALLCAGQVGAVLCFDASRLARNGRDWHHLLELCGLVEARVIDHDGVYNPCRPNDRLLLGMKGSISEFELGVLRARMLDAARSKARRGELRLSVPFGYIWHREAGLGLDPDLRLQDVIRSIFTRFHELGSARQVLLSMTKDQVHFPRPSDEGRMTSFVWMPVRYRNVIGILKNPFYAGVYVYGKSEKRTAIVDGRARRTYGHGKPAGTWEVMIRDHHEGYITWDEYERNQQQLALNNYGRSGGTKSGRGGKALLSGLLTCGRCGRRLSVAYTGNPQSRPVYRCDKPNLMMGLPRCMTFGGPRVDAAVARELLRAVEPLAIEATFEAERMHRERQEDQRHIHDLELRQARYEASLAERRYAACDPDNRLIAAQLEKNWETALRRVRDLEVRKPADSPSTIEVDPDTFTNLADNLQAAWDSPDVTMRARQQLLRTLIADIVVDVDDAVREVVLTIHWKGGQHSELKVRKPQSGEHGCATTEDALAVMRSMAGRWSDEHIAASLNRMGMPTGQGKTWTAHRVASVRRVRAIHAYKSADKDGEWMTMTEAAAALGVTNHRIRHLIKTKVLSAEQVVPGAPYQIRASDLASATVQAAIARKARPCRIADAETLPMFTDT

SEQ ID NO: 3286 - protein, 690 aa, Artificial Sequence
  Description of Artificial Sequence: Synthetic polypeptide
MTNSELLPATVLRRKAVVYVRQSTQTQVQTNLESQRRQYDLVQEARRRGFAQIEVIDDDLGRSASGMVARPGFDRLVAWLCAGEVGAVLCFDASRLARNGRDWHHLLELCGLVEARVIDLDGVYDPCRPNDRLLLGMKGSISEFELGVLRSRMFEAARAKAHRGELRISVPVGYIWHREVGLGFDPDARLQEAVHLIFERFRKLGSARQVLLSLAADGVHFPRPSDGKKMVSFDWTPIRYRNVISVLKNPFYAGVYVYGKSEKRTTLVEGRLRKSYGHGKPADTWDVVIKDHHEAYIGWAEFERNQKLLAINAYGRVDGVKSGRGGRALLSGMLCCGRCGRRLTVNYVGGGIRQAVYRCDRPNNYLGQPRCFTFGGRRPDEAITRELLRAVEPLAIEAAMHAQRRHMEVQAEQRRIVELDLQQARYEASLAERRYAACDPDHRLIASQLEKGWEAALERVRRCEQRVAAFDQEQEAAPPPNLDGLAEDLQAAWNAPGVTMRSRQQLLRTLVKDIIADVDDATREVVLTVHWRGGQHSQIRVIKPRTGEHGCRTPEDALAVIRSMAGKWSDEHIAASLNRMGLPTGQGKTWTAHRVSSTRRVHDIRAYRSAHKDSDWLTMSEAAATLGVNNHRIRRLIKDGLLPAEQVVPRAPYQIRASDLLDPKVTDAVGRTDRPCHADGGKQISMFSST

SEQ ID NO: 3287 - protein, 690 aa, Artificial Sequence
  Description of Artificial Sequence: Synthetic polypeptide
MMHEKIRPHHLERKAVLYVRQSSAHQVLHNRESRTLQYAMRDRLTTLGWSCIEIVDDDLGRSAAGGVARAGFDRMVAEVCLGKVGAVAAREVSRFARNSRDWQQLIEMCRVVDTVLIDQEAIYAPRQGNDRLLLGLKGSLNEYELDLLRQRSLAARFEKAKRGELVVTAPVGFIKVGDRVEKDPDRRVQEAIALVFDKVSELGSARQALLWFLEHGLDLPVRRPNGDIAWRRPCYATIHRMVGNPIYGGAYAYGKTGAAPTFGRMMAQPGRCRKTRNEWLALIPGTHEGYLSWERAEAIRTMVSNNAPMGQHHGAPKHGDALLAGLIRCRRCGRKLTLRYTGTAHNVPRYSCWRGLLDNGEPRCIAFGGLRVDDAIEEALLGVVGPGAVAAAIDAEKQAANKRDQVREFLQRDLEAAGYAADRAFRQYDAADPANRLVAAELEARWNKALTHVGEIEPRIVEHDAQTPASSPLPAADVSALAHNLRAVWSTPTTDARLKKRIVRSVIQEVVADLDDSASEIVLLVHWAGGVHTELRLPRRRHGQRNATPDDVNDAVRQLALIANDDLIAGILNRNGLTTGNGNRWTRERVTALRSYRKIPVFRPQADNIELWLNLGNAARLLGISPKTLRQAAEAGQIEGAHPLPDGPWIFSRSELTTPAARQIVDRARSNPRHPAGSHPDQQNLFSSIA

SEQ ID NO: 3288 - protein, 689 aa, Artificial Sequence
  Description of Artificial Sequence: Synthetic polypeptide
MSKITPEHLARQAVVYIRQSTPDQVVHNLESKRRQYNLPERARQLGWSDVAVIDDDLGRSGGGVARPGFEKLLAAICEVRVGVVVSIEASRLARNGRDWHTLLEFCGLVGTLIADEDGVYDPRQPNDRLLLGMKGTMSEMELSVLRQRSLEALKQKARRGELFMTVAVGYVRVGHNRIEKDPDRRVGEAIALVFAKFTEMQSVRQVHLWFRHERVPLPAVTYGAEGRLVEWKLPVYNTILHILTNPIYAGAYAFGRTGSRISIEAGRKKVVRGFKKERKDWEVLIPNHHEGYLSWADHERNLGLIADNANGKNPMSRGALRRGEALLAGLLRCGHCGRKLHVAYSGKNGNTGRYHCRGGANNHGGDPCISFGGMRIDRDVAAEVIERLQPLGIEAALAAQAARSRANEDKRGQVELALEQARYEVGRARRQYDAVDPDNRLVAAELEKRWNDRLAVVRNLETELEGLTASPAVDLTPADRERLMTLGADLERAWSSAGVAPETRKRIVRTLIDEIVVRVEDNALDLVIRWHGGDHSALKVKKNRSGQHRWSATGETVDLVRVLARQMPDKAIASVLNRSGKTTGRGNGWTKSRVCSLRSHNDIAAYREGERRDRGEVTLDEAAAALSVSPSTVRRLIKDGQLAASQLCKGAPWIIKAADLERPDVKRAATARRLRRPPSGNPLQKELEL

SEQ ID NO: 3289 - protein, 689 aa, Artificial Sequence
  Description of Artificial Sequence: Synthetic polypeptide
MTTSDLLPAAVLRRKAVVYVRQSTQSQVQTNLESQRRQYDLVAQARRLGFAQVEVIDDDLGRSASGMVDRPGFERLVAWLCAGEVGAVLCFDASRLARNGRDWHHLLELCGLVEARVIDPDGVYDPCRPNDRLLLGMKGSISEFELGVIRARMFEAARAKAHRGELRISVPIGYVWHRQIGLGLDPDMRLQETIRLIFARFRTLGSARQVMLSLAADDVHFPRPSDGKKMVSFDWTPIRYRNVISILKNPFYAGVYAYGKSEKRTTLVQGRLRKTYKHGKPLDRWDVMIKDHHEAYIDWAEFERNQKQLAVNAYGKVDGTKSGRGGRALLAGMLCCGRCGRRLTVAYTGRGVPQPVYRCDRPNLQLAQPRCFTFGARRPDEAIARELLRAVEPLAVEAALQAERRYMQVQADQRRIVELELQQARYEAGLAERRYAACDPDHRLIAAQLEKSWEAALQRVLACEQRLNVARQVQSSARPDLTGLEEDLAAAWDAPGVTMRARQQLLRTLVKDIVADVDDQAREVVLTIHWRGGQHSQVRVVKPRTGEHGCRTPDEALAVMRSMAGKWSDEHIAATLNRMGLPTGQAKTWTAHRVSSVRRVNDIHAYRSAEKDGQWLTMSEAAAKLGVNNHRIRRLIKEGLLPAEQVVPRAPYQIRASDLLEQRVIDAIARTLSPCRAVSEKQMSMFSST

SEQ ID NO: 3290 - protein, 689 aa, Artificial Sequence
  Description of Artificial Sequence: Synthetic polypeptide
MTITDLIPTALLARKAVVYVRQSTQSQVITNLESQRRQYDLVDIARHHGFSHVEVIDDDLGRSASGTVARPGFDRLVALLCAGKVGAVFCFDASRLARNGRDWHHLLELCGLVEARVIDHDGVYNPCRPNDRLLLGMKGSISEFELGVLRARMLDAARSKARRGELRLSVPFGYIWHREAGLGLDPDLRLQEVIRSIFARFHDLGSARQVLLSMTKDHIHFPRPSDEGRMTNFVWMPVRYRNVIGILKNPFYAGVYVYGKSEKRTAIVDGWARRSYGHGKPVGTWEVMIRDHHEGYISWGEYERNQQQLALNNYGRSGGTKSGRGGKALLSGLLTCGRSGRRLSVAYTGNPQNPVYRCYKQNLMMGLPRCMTFGGSKVDAAVARELLRAVEPLAIEATFKAERMHRERQEDQRHIHDLELQQARYEASLAERRYAACDPDNRLIAAQLEKNWETALRRVRDLEVRRPTESPSTIEVDPGTFANLADNLQAAWESPDVTMRVRQQLLRTLIADIVVDVDDEVRDVVLTIHWKGGQHSELKVRKPQTVEHGCATTEDALAVMRSMAGRWSDEHIAASLNRMGMPTGQGKTWTAHRVASVRRVRAIHAYKSADKEGEWLTMTEAAAVLGVTNHRIRHLIKTNVLSAEQVVPGAPYQIRASNLTSATVQAAIARKGRPCRIADTETLPMFTDT

SEQ ID NO: 3291 - protein, 689 aa, Artificial Sequence
  Description of Artificial Sequence: Synthetic polypeptide
MTITDLIPTALLARKAVVYVRQSTQSQVITNLESQRRQYDLVDIARQHGFSHVEVIDDDLGRSASGTVARPGFDRLVALLCAGKVGAVFCFDASRLARNGRDWHHLLELCGLVEARVIDHDGVYNPCRPNDRLLLGMKGSISEFELGVLRARMLDAARSKARRGELRLSVPFGYIWHREAGLGLDPDLRLQEVIRSIFARFHDLGSARQVLLSMTKDHIHFPRPSDEGRMTNFVWMPVRYRNVIGILKNPFYAGVYVYGKSEKRTAIVDGWARRSYGHGKPVGTWEVMIRDHHEGYISWGEYERNQQQLALNNYGRSGGTKSGRGGKALLSGLLTCGRSGRRLSVAYTGNPQNPVYRCYKQNLMMGLPRCMTFGGSKVDAAVARELLRAVEPLAIEATFKAERMHRERQEDQRHIHDLELQQARYEASLAERRYAACDPDNRLIAAQLEKNWETALRRVRDLEVRRPTESPSTIEVDPGTFANLADNLQAAWESPDVTMRVRQQLLRTLIADIVVDVDDEVRDVVLTIHWKGGQHSELKVRKPQTVEHGCATTEDALAVMRSMAGRWSDEHIAASLNRMGMPTGQGKTWTAHRVASVRRVRAIHAYKSADKEGEWLTMTEAAAVLGVTNHRIRHLIKTNVLSAEQVVPGAPYQIRASNLTSATVQAAIARKGRPCRIADTETLPMFTDT

SEQ ID NO: 3292 - protein, 689 aa, Artificial Sequence
  Description of Artificial Sequence: Synthetic polypeptide
MTSTDLIPTVLLERKAVVYVRQSTQSQVMTNLESQRRQYDLVDVARQRGFLDVEVIDDDLGRSASGTVARPGFDRLVALLCAGKVGAVLCFDASRLARNGRDWHHLLELCGLVEARVIDHDGVYNPCRPNDRLLLGMKGSISEFELGVLRARMLDAARSKARRGELRLSVPFGYIWHREAGLGLDPDLRLQDVIRSVFARFHELGSARQVLLSMTKDQIHFPRPSDERRMTNFVWTPVRYRNVIGILKNPFYAGVYVYGKSEKRTAIVDGRARRSYGHGKPVGTWEVMIRDHHEGYISWDEYERNQQQLALNNYGRSGGTKSGRGGKALLSGLLTCGRCGRRLSVAYTGNPHSPVYRCDKQNLMMGLPRCMTFGGPKVDAAVARELLRAVEPLAIEATFEAERMHRERQEDQRHIHDLELQQARYEASLAERRYAACDPDNRLIAAQLEKNWETALRRVRDLEERKPADRPSTIAVDPGTFANLADNLLAAWESPDVTMRVRQQLLRTLIADIVVDVDDAVRDVVLTIHWKGGQHSELKVRKPQTGEHGCATTEDALAVMRSMAGRWSDEHIAASLNRMGMPTGQGKTWTAHRVASVRRVRAIHAYKSADKDGEWLTMTEAAAALGVTNHRIRHLIKMKVLSAEQVVRGAPYQIRVSDLASATVQAAIARKGRPCRIADTETLPMFTDT

SEQ ID NO: 3293 - protein, 689 aa, Artificial Sequence
  Description of Artificial Sequence: Synthetic polypeptide
MSSTDLIPTALLARKAIVYVRQSSQSQVMTNLESQRRQYDLVDVARQHGFSNIETIDDDLGRSASGTVARPGFDRLVALLCAGQVGAVLCFDASRLARNGRDWHHLLELCGLVEARVIDHDGVYNPCRPNDRLLLGMKGSIGEFELGVLRARMLDAARSKARRGELRLSVPFGYIWHREAGLGLDPDLRLQDVIRSIFARFRELGSARQVLLSMTRDNIHFPRPSDEGRMTSFVWTPVRYRNVIGILKNPFYAGVYVYGKSEKRTAIVDGRARRSYGHGKPAGTWEVMIPDHHEGYISWDEYERNQQQLALNNYGRSGGTKSGRGGKALLSGLLTCGRCGRRLSVAYTRNPQNHVYRCYKQNLMMGLPRCMTFGGPKVDAAVARELLRAVEPLAIEATFEAERMHRERQEEQHHIHDLELRQARYEASLAERRYAACDPDNRLITAQLEKNWETALRHVRDLEVCKPADSPSTIEVDTGTFANLADNLQAAWESPDVTMRVRQQLLRTLIADIVVDVDDEVRDVVLTIHWKGGQHSELRVRKPQSGEHGCATTEDALAVMRSMAGRWSDEHTAASLNRMGMPTGQGKTWTAHRVASVRRVRAIHAYKSADKEGEWLTMTEAAAILGVTNHRIRHLIKTNVLSAEQVVPGAPYQIRASDLASATVQAAIARKGRPCRVADPDTLPMFTDT

SEQ ID NO: 3294 - protein, 689 aa, Artificial Sequence
  Description of Artificial Sequence: Synthetic polypeptide
MISTDLIPTVLLERKAVVYVRQSTQSQVMTNLESQRRQYDLVDVARQRGFLDVEVIDDDLGRSASGTVARPGFDRLVALLCAGKVGAVLCFDASRLARNGRDWHHLLELCGLVEARVIDHDGVYNPCRPNDRLLLGMKGSISEFELGVLRARMLDAARSKARRGELRLSVPFGYIWHREAGLGLDPDLRLQDVIRSIFARFHELGSARQVLLSMTKDQIHFPRPSDERRMTNFVWTPVRYRNVIGILKNPFYAGVYVYGKSEKRTAIVDGRARRSYGHGKPVGTWEVMIRDHHEGYISWDEYERNQQQLALNNYGRSGGTKSGRGGKALLSGLLTCGRCGRRLSVAYTGNPHNPVYRCDKQNLMMGLPRCMTFGGPKVDAAVARELLRAVEPLAIEATFEAERMHRERQEDQRHIHDLELQQARYEASLAERRYAACDPDNRLIAAQLEKNWETALRRVRDLEERKPADSPSTIAVDPGTFANLADNLLAAWESPDVTMRVRQQLLRTLIADIVVDVDDAVRDVVLTIHWKGGQHSELKVRKPQTGEHGCATTEDALAVMRSMAGRWSDEHIAASLNRMGMPTGQGKTWTAHRVASVRRVRAIHAYKSADKDGEWLTMTEAAAALGVTNHRIRHLIKMKVLSAEQVVRGAPYQIRVSDLASATVQAAIALKGRPCRIADTETLPMFTDT

SEQ ID NO: 3295 - protein, 689 aa, Artificial Sequence
  Description of Artificial Sequence: Synthetic polypeptide
MTSTDLIPTALLARKAVVYVRQSTQSQVITNLESQRRQYDLVDIARQRGFSDVEVIDDDLGRSASGTVARPGFDRLVALLCAGKVGAVFCFDASRLARNGRDWHHLLELCGLVEARVIDHDGVYNPCRPNDRLLLGMKGSISEFELGVLRARMLDAARSKARRGELRLSVPFGYIWHREAGLGLDPDLRLQEVIRSIFTRFHELGSARQVLLSMTKDQIHFPRPRDEGRMTNFVWIPVRYRNVIGILKNPFYAGVYVYGKSEKRTAIVDGRARRSYGHGKPVGTWEVMIRDHHEGYISWDEYERNQQQLALNNYGRSGGTKSGRGGKALLSGLLTCGRCGRRLSVAYTGNPQSPVYRCYKQNLMMGLPRCMTFGGSKVDAAVARELLRAVEPLAIEATFEAERMHRERQEDQRHIHDLERQQARYEASLAERRYAACDPDNRLIAAQLEKNWETALRRVRDLEVRRPAESPSTIEVDPGTFANLADNLQAAWESPDVTMRVRQQLLRTLIADIVVDVDDEVRDVVLTIHWKGGQHSELKVRKPQTGEHGCATTEDALAVMRSMAGRWSDEHIAASLNRMGMPTGQGKTWTAHRVASVRRVRAIHAYKSAGKDGEWLTMTEAAAVLGVTNHRIRHLINTNVLSAEQVVPGAPYQIRASDLTSATVQAAIARKGRPCRIPDTETLPMFTDT

SEQ ID NO: 3296 - protein, 689 aa, Artificial Sequence
  Description of Artificial Sequence: Synthetic polypeptide
MKITAEHLARGAYVYVRQSTADQLVNNPESRRRQYGLAERARSLGWKDAIVIDEDLGRSGSGISRPGFEKLLAAICEGRVGAVLAIEASRLARNGRDWHTLIEFCGLVGTLIIDEDGIYEPRHPNDRLLLGMKGTMSELELSILRARSIEALKQKARRGELFLTVAIGYVKSGRNRIEKDPDLRIREAIDRVFRRFDELQSIRQVHLWLRSEGIMLPAVNYTRAADRAIVWKLPVYNTVHHILTNPIYAGAYAFGRTCSKVTIEAGRKRILRGIRRDRADWEVLLIDHHEGYLSWHDFERNQRLITDNATSKGLVPRGALRRGELLLGGLLRCGHCGRKLHVSYSGSNGNTGRYHCRGAQVNHGTDPCIGFGSLRVDQAVSAEVLQRLQPLGIEAAIKAIETSTVQAGEKRRHVELALEQARYDAAHARRQYDAVDPDNRLVAGELERRWNAALVAVRERQDELDALDRHKPEALGEEERRSLLRMGADLELAWHHANATATTRKRIIRAVIREIVVAIEDDHIKMLVHWQGGDHTALSVRKNKAGHHRWGAPPDIEELIRALARQLPDRAIASLLNRLGKTTGRQNGWTQSRVCTFRNQHDIAVYKKDERSERGEYTLQETAAKLGLRPMTVLRMIRAGDLKAEQYCKGTPWIIRHEDIEQLDIQHHSGRSEHSPLSQSQDQQIQLFQ

SEQ ID NO: 3297 - protein, 689 aa, Artificial Sequence
  Description of Artificial Sequence: Synthetic polypeptide
MSNTDLIPTALLARKAIVYVRQSSQSQVMTNLESQRRQYDLVDVARQHGFSDIETIDDDLGRSASGTVARPGFDRLVALLCAGQVGAVLCFDASRLARNGRDWHHLLELCGLVEARVIDHDGVYNPCRPNDRLLLGMKGSISEFELGVLRARMLDAARSKARRGELRLSVPFGYIWHREAGLGLDPDLRLQDVIRSIFARFRELGSARQVLLSMTRDNIHFPRPSDEGRMTSFVWTPVRYRNVIGILKNPFYAGVYVYGKSEKRTAIVDGRARRSYGHGKPAGTWEVMIRDHHEGYISWEEYERNQQQLALNNYGRSGGTKSGRGGKSLLSGLLTCGRCGRRLSVAYTGNPQNPVYRCYKQNLMMGLPRCMTFGGSKVDAAVARELLRAVEPLAIEATFEAERMHRERQEEQRHIHDLELRQARYEASLAERRYAACDPDNRLIAAQLEKNWETALRRVRDLEVRKPADSPSTIEVDTGTFANLADNLQAAWESPDVTMRVRQQLLRTLIADIVVDVEDEVRDVVLTIHWKGGQHSELRVRKPQSGEHGCATTEDALAVMRSMAGRWPDEHIAASLNRMGMPTGQGKTWTAHRVASVRRVRAIHAYKSADKEGEWLTMTEAAATLGVTNHRIRHLIKTNVLSAEQVVPGAPYQIRASDLTSATVQAAIARKGRPCRTTDTETLPMFTDT

SEQ ID NO: 3298 - protein, 689 aa, Artificial Sequence
  Description of Artificial Sequence: Synthetic polypeptide
MTGNDLLPVTVLKRKAVVYVRQSTPGQVQNNLESQRRQYELVDVARRWGFHDVEVIDDDLGRTASGTVDRPGFERLVSGLCTGKVGAVLCLDASRLSRNGRDWHHLLELCGLVEARVIDLDGVYDPCRPNDRLLLGMKGSISEFELGILRTRMLDAARAKARRGELRLSVPIGYIWHREYGLGLDPDIRVQEAIRLIFSRFRELGSARQVLISLTADNFHFPRPSDGRKTVSFDWVPVRYRSVISILKNPFYAGVYVYGKSEKRTEIVDGRARKSYGHSKPFGTWEVLLQDHHEGYIDWSEFERNQSHIAVNAFGQKGGIKSGRGGRALLAGLLTCGRCGRRLGVVYSGRPPGHPYYRCERINQMLAKPRCMTFGASRIDPAIGKEILRAVTPMAIEAAMEADRAHRDNLEERHRMVELDLQQARYEASLAERRYAACDPDNRLIAAQLENSWEAALRRVEACEAGLAQARQIDLAAPVPDFAGIATDLETAWRSPNVDMRCRQQLLRTLVTDIIADVDEEQREVILTIHWKGGQHSQLRIRKPKAGEHGQSTPEAALAIIRSMATRWSDADIAATLNRMGMQTGQGKTWTARRVGSLRTVHKIHGYRSAEKNGEWLTLTEAAKKLGVTAHRVRRLIKEGVLPTEQVVPDAPHQIRATDLEKDEVTQFPRHRGPCRIKMENQKSLFPDI

SEQ ID NO: 3299 - protein, 688 aa, Artificial Sequence
  Description of Artificial Sequence: Synthetic polypeptide
MTITDLIPTALLARKAVVYVRQSTQSQVITNLESQRRQYDLVDIARHHGFSHVEVIDDDLGRSASGTVARPGFDRLVALLCAGKVGAVFCFDASRLARNGRDWHHLLELCGLVEARVIDHDGVYNPCRPNDRLLGMKGSISEFELGVLRARMLDAARSKARRGELRLSVPFGYIWHREAGLGLDPDLRLQEVIRSIFARFHDLGSARQVLLSMTKDHIHFPRPSDEGRMTNFVWMPVRYRNVIGILKNPFYAGVYVYGKSEKRTAIVDGWARRSYGHGKPVGTWEVMIRDHHEGYISWGEYERNQQQLALNNYGRSGGTKSGRGGKALLSGLLTCGRSGRRLSVAYTGNPQNPVYRCYKQNLMMGLPRCMTFGGSKVDAAVARELLRAVEPLAIEATFKAERMHRERQEDQRHIHDLELQQARYEASLAERRYAACDPDNRLIAAQLEKNWETALRRVRDLEVRRPTESPSTIEVDPGTFANLADNLQAAWESPDVTMRVRQQLLRTLIADIVVDVDDEVRDVVLTIHWKGGQHSELKVRKPQTVEHGCATTEDALAVMRSMAGRWSDEHIAASLNRMGMPTGQGKTWTAHRVASVRRVRAIHAYKSADKEGEWLTMTEAAAVLGVTNHRIRHLIKTNVLSAEQVVPGAPYQIRASNLTSATVQAAIARKGRPCRIADTETLPMFTDT

SEQ ID NO: 3300 - protein, 688 aa, Artificial Sequence
  Description of Artificial Sequence: Synthetic polypeptide
MTGNNLIPATVLNRKAVVYVRQSTSGQVQNNLESQRRQYELVDVARRWGFRDVEVIDDDLGRTASGAADRPGFERLVSGLCTGMVGAVLCLDASRLSRNGRDWHHLLELCGLVEARVIDLDGVYDPCRPNDRLLLGMKGSISEFELGILRTRMLDAARAKARRGELRLSVPIGYIWHRDYGLGLDPDLRVQEAIRLIFSRFRELGSARQVLISLTTDNFHFPRPSDGRKRVSFDWVPLRYRSVISILKNPFYAGAYAYGKSEKRTEIVDGRARKSYGHGKPFGTWEVLLRDHHEGYIDWSEFERNQSLIAVNTFAKKGGIKSGRGGQALLAGLLTCGRCGRRLSVSYRGRPSHPYYQCKSINQMLAKPRCMTFGASRIDPAIGKEILSAVTPMAIEAAMEADRAHRDNLEERHRMMELDLQQARYEASLAERRYAACDPDNRLIAAQLEKSWESALRRVETCEAALTQARQIDAGIPIPDFAGIATDLEAAWSAPNVDTRCRQQLLRTLVTDIVADVDEEQREVILTIHWKGGQHSQLRIRKPNPGEHGQKTPDAALAVMRSMATRWSDADIAATLNRMGMQTGQGKTWTARRVGALRTVHKIHGYRSAEKNGEWLTLTEAAKKLGVTAHRVRRLIKEGVLPTEQVVPDAPHQIRAADLEKDEVIQFPRYRGPCRIKMENQKSLFPDV

SEQ ID NO: 3301 - protein, 688 aa, Artificial Sequence
  Description of Artificial Sequence: Synthetic polypeptide
MTGNNLIPATVLNRKAVVYVRQSTPGQVQNNLESQRRQYELVDVARRWGFRDVEVIDDDLGRTASGAADRPGFERLVSGLCTGMVGAVLYLDASRLSRNGRDWHHLLELCGLVEARVIDLDGVYDPCRPNDRLLLGMKGSISEFELGILRTRMLDAARAKARRGELRLSVPIGYIWHRDYGLGLDPDLRVQEAIRLIFSRFRELGSARQVLISLTADNFHFPRPSDGRKRVSFDWVPLRYRSVISILKNPFYAGAYAYGKSEKRTEIVDGRARKSYGHGKPFGTWEVLLRDHHEGYIDWSEFERNQSLIAVNTFAKKGGIKSGRGGQALLAGLLTCGRCGRRLSVSYRGRPSHPYYQCKSINQMLAKPRCMTFGASRIDPAIGKEILSAVTPMAIESAMEADRVHRDNLEERHRMMELDLQQARYEASLAERRYAACDPDNRLIAAQLEKSWESALRRVETCEAALTQARQIDTGIPTPDFAGIATDLEAAWSAPNVDTRCRQQLLRTLVTDIVADVDEEQREVILTIHWKGGQHSQLRIRKPNPGEHGQKTPEAALAVMRSMATRWSDADIAATLNRMGMQTGQGKTWTARRVSALRTVHKIHGYRSAEKNGEWLTLTEAAKKLGVTAHRVRRLIKEGVLPTEQVVPDAPHQIRAADLEKDEVTQFPRYRGPCRIKMENQKSLFPDV

SEQ ID NO: 3302 - protein, 688 aa, Artificial Sequence
  Description of Artificial Sequence: Synthetic polypeptide
MRSELITDRHLARHAVIYIRQSSPHQVLSNQESLRLQYDLRRRALGLGWREEDVEIIDADLGLSGAAAVHREGFKDLIARVTLGQVGIVLSSEVTRLTRNCSDWYPLLDLCGYRDCLIADRDGVYDPGTANGRLLLGLKGTLSEVELHTIRARLTAGLLNKAARGELALILPVGLVRETGGVVVKNPDREVQARLDLIFTTFLRLRSASKVLHAFNERGLSIPRRGRFGDTVWRPPTVAAILQVLKNPAYAGAFVYGRTRSVRTAPLGKGSQKRLPREQWRIVVKDQYPAYISWATFEKIEAMLRDNYAEYDRNKTRGVPREGAALLHGMVYCGACGHKMVVQYKGGARYMCNYLRQQHGVPVCQVIPAAPVDAEAVAAFFKALTPAELDAYTQAVSLRREADAAGLKAQAQQVERLRYRAALAERQFDQVDPDNRLVAAELERRWEETLRDLRQAEAALADAAPEEGRVIPFGVGPDLQAAFTEVGRRLPDLWQQPALTTVRKKALLRCLIDKVVIHRAVRDTIALRLVWRGGATSEIALPITVGSLAELSRSGEMEAAIVERARAGESDAAIAAALTAAGHRSPLRQAVLPSTVQAIRLRHGILRERRQSHPRRIPGCLTVSQLAAQLGVTPHWIYDRIYNGTIAIELDAKTGLYLFPDGPTTLRAFQKLKAGKVDRLSPVPRLAC

SEQ ID NO: 3303 - protein, 688 aa, Artificial Sequence
  Description of Artificial Sequence: Synthetic polypeptide
MTGNNLIPATVLNRKAVVYVRQSTPGQVQNNLESQRRQYELVDVARRWGFRDVEVIDDDLGRTASAAVDRPGFERLVSGLCTGMVGAVLCLDASRLSRNGRDWHHLLELCGLVEARVIDLDGVYDPCRPNDRLLLGMKGSISEFELGILRTRMLDAARAKARRGELRLSVPIGYIWHRDYGLGLDPDLRVQEAIRLIFSRFRELGSARQVLISLTADNFHFPRPSDGRKRVSFDWVPLRYRSVISILKNPFYAGAYAYGKSEKRTEIVDGRARKSYGHGKPFGTWEVLLQDHHEGYIDWGEFERNQSLIAVNTFAKKGGIKSGRGGQALLAGLLTCGRCGRRLSVSYRGRPSHPYYQCKSINQMLAKPRCMTFGASRIDPAIGKEILSAVTPMAIEAAMEADRVHRDNLEERHRMMELDLQQARYEASLAERRYAACDPDNRLIAAQLEKSWESALRRVEACEAALTQARQIDAGIPIPDFAGIATDLEAAWSAPNVDTRCRQQLLRTLVTDIVADVDEEQREVILTIHWKGGQHSQLRIRKPNPGEHGQKTPEAALAVMRSMATRWSDADIAATLNRMGMQTGQGKTWTARRVGALRTVHKIHGYRSAEKNGEWLTLTEAAKKLGVTAHRVRRLIKEGVLPTEQVVPDAPHQIRAADLEKDEVTQFPRYRGPCRIKMENQKSLFPDV

SEQ ID NO: 3304 - protein, 688 aa, Artificial Sequence
  Description of Artificial Sequence: Synthetic polypeptide
MTDVDILPPSILKRKAVVYVRQSSQAQVQHNLESQRRQYELVDEARRRGFRDVEVIDDDLGRSASGTVARPGFDKLVAGLCAGNVGAVLCLDASRLARNGRDWHHLLELCGLVEARVIDLEGVYNPCRPNDRLLLGMKGSISEFELGILRSRMLDAARSKARRGELRIPVPIGYIWHREIGLGFDPDLRVQEAVRQIFERFRQLGSGRQVYRALSAEHVHFPRPSDGKRSVSFDWTPIRYRNVISVLKNPFYAGAYAYGKTEKRTEIIDGRAHKTYKHPRALSDCEILLKGHHEGYIDWSEYERNQKQLSLNDFGRRGGPKSGRGGRSLLIGLMACGRCGRRLKVGYRGRYPYPIYQCFGADVYNSARCMSFAGQRTDRAIASQLIRAVEPMAVEAALKAERMYMEGQAEQQRMIELELQQARYDASLAERRYAACDPDNRLIAATLEKNWEATLRRVQECEARLSAAEATNADKTVPDFAGLADDLQAAWANPQVTMRTRQQLLRSLVNEITANIDDVAHEIVLTIHWKGGQHSEVRLHKPSSGEHECRTSDDAIAVITSMATRWSDEDIAATLNRMRMPTAQGKTWTAKRVSSIRRVRDIHAYRSAEKDGTWLTLREAAQHCGVTSHRIRRLIEAKILPAEQVVPGAPYQILAADLNSDAVVRAMGRNGGPCHLETQNQIPMFPNT

SEQ ID NO: 3305 - protein, 687 aa, Artificial Sequence
  Description of Artificial Sequence: Synthetic polypeptide
MMHEKIGPHHLERKAILYVRQSSVSQVLHNRESSALQYAMRDRLTALGWSRIETVDDDLGRSAAGGVTRAGFDRMVAEVCLGKVGAVAAREVSRFARNSRDWQQLIEMCRVVDTVLIDQEAVYAPRQGNDRLLLGLKGSLNEYELDLLRQRSLSARYEKARRGELVVTVPVGFLKVGDRIEKDPDRRIQEAIALVFNKVAELGSARQALLWFLEHGLDLPVRRANGDAIWRRPNYATIHRMIANPIYGGAYAYGKSRSVPGYGGRSGIRRKARDEWLALIPDAHEGYVSWERAEAIRKMVSDNVPASRHHGAPKHGDALLAGLFRCKRCGRKLTVRYTGANHNIPRYSCWRGLLDNGEPRCIAFGGLRVDDAIEEALLGVVEPGAIAAAVEAERNRASQRDQVQDALLRDLEAARYAADRAFRQYDAADPENRLVTSELEARWNKALTRVSEMESKIASHQAATPQSTPMSTLEMAALAGSLRTVWAAPATDARLKKRIVRTVIHEVIADLDDMTSEIVLVIHWVGGIHTELRLPKRHRGQRNATPDDIIEAVRQLVLIANDDVIAGVLNRNGLMTGNGNRWTRERVTALRSYRKIPVFRPQSDGIEPWLNLGDAARLLGVAPKTLRLAAEAGEIEGVHPLPDGPWIFSRSKLATSRAQQIVHRARQNPRYPTGSPPDQENLFPSTT

SEQ ID NO: 3306 - protein, 687 aa, Artificial Sequence
  Description of Artificial Sequence: Synthetic polypeptide
MMHEKIGPHHLERKAILYVRQSSAHQVLHNRESSALQYAMRDRLAALGWSYIETVDDDLGRSAAGGVTRAGFDRMVAEVCLGKVGAVAAREVSRFARNSRDWQQLIEMCRVVDTVLVDQEAVYAPRQGNDRLLLGLKGSLNEYELDLLRQRSLSARYEKARRGELVVTVPAGFVKAGDRIEKDPDRRIQEAIALVFNKVTELGSARQALLWFLEQGLDLPVRCANGDVIWRRPNYATIHRMIANPIYGGAYAYGKSRSVPGYDGRSGIRRKARDEWLALIPDAHEGYISWERAEEIRKMVSDNVPASRHHGAPKHGDALLAGLFRCKRCGRKLTVRYTGANHNIPRYSCWRGLLDNGEPRCIAFGGLRVDDAIEEALLGVVEPGAIAAAFEAERNMASQRDQVQDALLRDLEAVRYVADRAFRQYDAADPENRLVTSELEARWNKALARVGEIEAKIAKHRTVTPQPFPMSASQVTALAGNLRTVWTAPTTDARLKKRIVRTLINEVVADLDDGTSEIVLVIHWVGGVHTELRLPKRRRGQRNATPDDIVDAVRQLVLIANDDVIAGVLNRNGLTTGNGNRWTRERVTALRSYRKIPVFRPQIDGVEPWLNLGGAAKLLGITPKTLRLAAEAGDIEGVHPLPDGPWIFSRSKLATPQARQILDRARKNPRHPAGSPPDQENLFPSMT

SEQ ID NO: 3307 - protein, 687 aa, Artificial Sequence
  Description of Artificial Sequence: Synthetic polypeptide
MMHEKIAPHHLERKAILYVRQSSAHQVLHNRESSALQYAMRDRLAALGWSHIETVDDDLGRSAAGGVTRAGFDRMVAEVCLGKVGAVAAREVSRFARNSRDWQQLIEMCRVVDTVLVDQEAVYAPRQGNDRLLLGLKGSLNEYELDLLRQRSLSARYEKARRGELVVTVPAGFVKAGDRIEKDPNRRIQEAIALVFDKVTELGSARQALLWFLEQGLDLPVRCANGDVIWRRPNYATIHRMIANPIYGGAYAYGKSRSVPGYDGRSGIRRKARDEWLALIPDAHEGYISWERAEEIRKMVSDNVPASRHHGAPKHGDALLAGLFRCKRCGRKLTVRYTGANHNIPRYSCWRGLLDNGEPRCIAFGGLRVDDAIEEALLGVVEPGAIAAAVEAERNMANQRDQVQDALMRDLEAARYVADRAFRQYDAADPENRLVTSELEARWNKALTGVGEIEAKIAKHRTVTPHPFPMSASQVTALAGNLRAVWTAPTTDARLKKRIVRTLINEVVADLDDGTSEIVLVIHWVGGVHTELRLPKRHRSQRNATPDDIVDAVKQLVLIANDDVIAGVLNRNGLTTGNGNRWTRERVTALRSYRKIPVFRPQIDGVEPWLNLGGAAKLLGISPKTLRLAAEAGDIKGAHPLPDGPWIFSRSKLATPQARQILDRVRKNPRHPAGSPPDQENLFLSMT

SEQ ID NO: 3308 - protein, 687 aa, Artificial Sequence
  Description of Artificial Sequence: Synthetic polypeptide
MMHEKIGPHHLARKAILYVRQSSAHQVLHNRESSALQYAMRDRLAALGWSQIETVDDDLGRSAAGGVTRAGFDRMVAEVCLGKVGAVAAREVSRFARNSRDWQQLIEMCRVVDTVLVDQEAVYAPRQGNDRLLLGLKGSLNEYELDLLRQRSLSARYEKARRGELVVTVPAGFVKAGDRIEKDPDRRIQEAIALVFNKVTELGSARQALLWFLEQGLDLPVRCANGDVIWRRPNYATIHRMIANPIYGGAYAYGKSRSVPGYDGRSGIRRKARDEWLALIPDAHEGYISWERAEEIRKMVSDNVPASRHHGAPKHGDALLAGLFRCKRCGRKLTVRYTGANHNIPRYSCWRGLLDNGEPRCIAFGGLRVDDAIEEALLGVVEPGAIAAAVEAERNMASQRDQVQDALLRDLEAARYVADRAFRQYDAADPENRLVTSELEARWNRTLARVGEIETRIAKHRTVTPQPFPMSASQVTALAGNLRTVWTAPTTDARLKKRIVRTLINEVVADLDDGTSEIVLVIHWVGGVHSELRLPKRRRGQRNATPDDIVDAVRQLVLIANDDVIAGVLNRNGLTTGNGNRWTRERVTALRSYRKIPVFRPQIDGVEPWLNLGGAAKLLGITPKTLRLAAEAGDIEGAHPLPDGPWIFSRSKLATSQARQILDRARQNPRHPAGSPPDQENLFPSMA

SEQ ID NO: 3309 - protein, 687 aa, Artificial Sequence
  Description of Artificial Sequence: Synthetic polypeptide
MMHEKISAHHLERKAILYVRQSSAHQVLHNRESSALQYAMRDRLKALGWAQIETVDEDLGRSAAGGVTRAGFDRMVAEVCLGKVGAVAAREVSRFARNSRDWQQLIEMCRVVDTVLIDQEAVYAPRQGNDRLLLGLKGSLNEYELDLLRQRSLSARYEKARRGELVVTVPIGFLKAGDRIEKDPDRRIQEAIALVFNKVAELGSARQALLWFLEQGLDLPVRRANGEVTWRRPNYATIHRMIDNPIYGGAYAYGKSRSMPGYDGRSGIRRKARAEWLALIPDAHEGYVSWERAEEIRKMVSNNVPASRHHGAPKHGDALLAGLFRCKRCGRKLTVRYTGNNHNIPRYSCWRGLLDNGEPRCIAFGGLRVDDAIEEMLLGVVEPGAIAASAEAERNIANRRDQVHDALQRDLEAASFAADRAFRQYDTADPENRLVASELEARWNKALIRVGEIENKIASHKAAIPQVSSYSMLDIAALAGDLRAVWSAPTTDTRLKKRIVRTVIHEVIADLDDVASEIVLVIHWAGGVHTELRLPKRRRGQRNATPDDLIEAVRQLVLIANDDLIAGILNRNGLATGNGNRWTRERVTALRSYRKIPVYRPQSDGIEPWLNLGKAAKLLGVTPKTLRIAAETGEIEGVHPLPAGPWIFSRSKLELPQAKQLVDRVRQNPRHPAGSPQNQGNLFTSTT

SEQ ID NO: 3310 - protein, 687 aa, Artificial Sequence
  Description of Artificial Sequence: Synthetic polypeptide
MMHEKIAPHHLERKAILYVRQSSAHQVLHNRESSALQYAMRDRLAALGWSHIETVDDDLGRSAAGGVTRAGFDRMVAEVCLGKVGAVAAREVSRFARNSRDWQQLIEMCRVVDTVLVDQEAVYAPRQGNDRLLLGLKGSLNEYELDLLRQRSLSARYEKARRGELVVTVPAGFVKAGDRIEKDPNRRIQEAIALVFDKVTELGSARQALLWFLEQGLDLPVRCANGDVIWRRPNYATIHRMIANPIYGGAYAYGKSRSVPGYDGRSGIRRKARDEWLALIPDAHEGYISWERAEEIRKMVSDNVPASRHHGAPKHGGALLAGLFRCKRCGRKLTVRYTGANHNIPRYSCWRGLLDNGEPRCIAFGGLRVDDAIEEALLGVVEPGAIAAAVEAERNMANQRDQVQDALMRDLEAARYVADRAFRQYDAADPENRLVTSELEARWNKALTGVGEIEAKIAKHRTVTPHPFPMSASQVTALAGNLRAVWTAPTTDARLKKRIVRTLINEVVADLDDGTSEIVLVIHWVGGVHTELRLPKRHRGQRNATPDDIVDAVKQLVLIANDDVIAGVLNRNGLTTGNGNRWTRERVTALRSYRKIPVFRPQIDGVEPWLNLGGAAKLLGISPKTLRLAAEAGDIKGAHPLPDGPWIFSRSKLATPQARQILDRVRKNPRHPAGSPPDQENLFLSMT

SEQ ID NO: 3311 - protein, 687 aa, Artificial Sequence
  Description of Artificial Sequence: Synthetic polypeptide
MMHEKIGPHHLERKAILYVRQSSAHQVLHNRESSTLQYAMRDRLTALGWSRIETVDDDLGRSAAGGVTRAGFDRMVAEVCLGKVGAVAAREVSRFARNSRDWQQLIEMCRVVDTVLIDQEAVYAPRQGNDRLLLGLKGSLNEYELDLLRQRSLSARYEKARRGELVVTVPVGFLKVGDRIEKDPDRRIQDAIALVFNKVAELGSARQALLWFLEHGLDLPVRRADGDVIWRRPNYATIHRMIANPIYGGAYAYGKSRSVPGYGGRSGIRRKARDEWLALIPDAHEGYISWERAEEIRKMVSDNVPASRHHGAPKHGDALLAGLFRCKRCGRKLTVRYTGANHNIPRYSCWRGLLDNGEPRCIAFGGLRVDDAIEEAVLGVVEPGAIAAAIEAERRMASQRDQVQDALLRDLEAARYAADRAFRQYDAADPENRLVTSELEARWNTALARAGEIEAKIAKHRTVAPQPIPMSASQVAALAGNLRAVWTAPTTDARLKKRIVRTLINEVVADLDDGTSEIVLVIHWVGGVHTELRLPKRRRGQRNATPDDIVDAVRQLVLIANDDVIAGVLNRNGLTTGNGNRWTRERVTALRSYRKIPVFRPRVDGVEPWLNLGGAAKLLGITPKTLRLAAEAGQIEGAHPLPDGPWIFSRSKLATPQAHQILDRARQNPRHPTGSHPDQENLFPSTT

SEQ ID NO: 3312 - protein, 687 aa, Artificial Sequence
  Description of Artificial Sequence: Synthetic polypeptide
MMHEKIGPHHLARKAILYVRQSSAHQVLHNRESSALQYAMRDRLAALGWSQIETVDDDLGRSAAGGVTRAGFDRMVAEVCLGKVGAVAAREVSRFARNSRDWQQLIEMCRVVDTVLVDQEAVYAPRQGNDRLLLGLKGSLNEYELDLLRQRSLSARYEKARRGELVVTVPAGFVKAGDRIEKDPDRRIQEAIALVFNKVTELGSARQALLWFLEQGLDLPVRCANGDVIWRRPNYATIHRMIANPIYGGAYAYGKSRSVPGYDGRSGIRRKARDEWLALIPDAHEGYISWERAEEIRKMVSDNVPASRHHGAPKHGDALLAGLFRCKRCGRKLTVRYTGANHNIPRYSCWRGLLDNGEPRCIAFGGLRVDDAIEEALLGVVEPGAIAAAVEAERNMASQRDQVQDALLRDLEAARYVADRAFRQYDAADPENRLVTSELEARWNRTLARVGEIETRIAKHRTVTPQPFPMSASQVTALAGNLRTVWTAPTTDARLKKRIVRTLINEVVADLDDGTSEIVLVIHWVGGVHSELRLPKRRRGQRNATPDDIVDAVRQLVLIANDDVIAGVLNRNGLTTGNGNRWTRERVTALRSYRKIPVFRPQIDGVEPWLNLGGAAKLLGITPKTLRLAAEAGDIEGDHPLPDGPWIFSRSKLATSQAGQILDRARKNPRHPAGSPPDQENLFPSTT

SEQ ID NO: 3313 - protein, 687 aa, Artificial Sequence
  Description of Artificial Sequence: Synthetic polypeptide
MMHEKIGPHHLERKAILYVRQSSAHQVLHNRESSALQYAMRDRLAALGWSHIETVDDDLGRSAAGGVTRAGFDRMVAEVCLGKVGAVAAREVSRFARNSRDWQQLIEMCRVVDTVLVDQEAVYAPRQGNDRLLLGLKGSLNEYELDLLRQRSLSARYEKARRGELVVAVPVGFVKAGDRIEKDPDRRIQEAIALVFNKVAELGSARQALLWFLEQGLDLPVRYANGDVIWRRPNYATIHRMIANPIYGGAYAYGKSRAVPGYDGRSGIRRKTRDEWLALIPDAHEGYVSWERAEEIRKMVSNNVPSSRHHGAPKHGDALLTGLFRCKRCGRKLTVRYTGNNHNIPRYSCWRGLLDNGEPRCIAFGGLRVDDAIEEALLGVVEPGAVTAAIEAERNMASQRDQVQDALLRDLEAARYVADRAFRQYDAADPENRLVTSELEAPWNKALARVGEIEAKIAKHRTVTPQPFAMSASQVTALAGNLRTVWTAPTTDARLKKRIVRTLINEVVADLDDGTSEIVLVIHWVGGVHTELRLPKRRRGQRNATPDDIVDAVRQLVLIANDDVIAGVLNRNGLTTGNGNRWTRERVTALRSYRKIPVFRPQIDGVEPWLNLGGAAKLLGITPKTLRLAAEAGEIEGTHPLPDGPWIFSRSKLATSQARQILDRARQNPRHPTGSHPDQESLFPSTT

SEQ ID NO: 3314 - protein, 687 aa, Artificial Sequence
  Description of Artificial Sequence: Synthetic polypeptide
MMHEKIRPHHLERKAILYVRQSSAHQVLHNRESSALQYAMRDRLTSLGWSSVEIIDDDLGRSAAGTVTRAGFERMVAEVCLGKIGAVAAREVSRFARNSRDWQQLIEMCRVVDTVLIDQETVYAPRQGNDRLLLGLKGSLNEYELDLLRQRSLSARYEKARRGELIVAAPVGFVKVADRLEKDPDRRVQEAITLVFEKVVELGSARQALMWFLEHELDLPAKRNNGDTIWRRPTYATIHRMIENPVYGGAYAYGKTSATPGFGQSATIRRNAREEWLALIPGVHEGYVSWERAEAIRKMVSDNAVTSRHHGAPKHGDALIAGLFRCRRCGRKLTVRYTGAKHNIPRYSCWRGHLDNGEPRCIAFGGLRVDDAIEGAILRVVEPGAIAAAAEAEAQASSRRDQVRDALGRDLEAARYAANRAFRQFDAADPENRLVAAELEIRWNRALELVGEIESKISAHDRTAPKPSLLMQTGIASLAQDLRTVWAAPTTDARLKKRIVRTVIQEVVADIDDATSEIVLMVHWIGGIHTEMRLPKRRRGQRNSTSGDIVAAIRQLVLIANDDLIAGVLNRNGLLTGHGNRWTKERVTAHRSHHKIPVFRPAPDGNEPWLNLNKAARFIGVAPKTLRLAAEAGEIKGQHPLSDGPWIFNRSDLEKQEAQNLLHRVRKNPRHPAGSHPDQNTLFPTTA

SEQ ID NO: 3315 - protein, 686 aa, Artificial Sequence
  Description of Artificial Sequence: Synthetic polypeptide
MSKITPDHLARHAYVYVRQSSPDQLLHNHESRRRQYGLADRARQLGWAEVVVIDDDLGRSGGGIARPGFERLLGAICEGRVGIVLAIEASRLARNGRDWHTLLEFCGLVGCLLADEDGVYDAKLPNDRLLLGMKGTMSEMELSILRQRSLEALRQKARRGELFLTVAVGYIKTHHDRIAMDPDLRVREALGLVFRKFAEFQSIRQVHLWLRQERIRLPAVERTAEGPRIVWKLPVYNTLHHLLTNPIYGGAYAFGRTGSRVSVQDGRKRVVRGFRRTQAEWEVLIPDHHEGYISWAEFGRNQALIADNANSKGMMARGSVRRGDALLAGLLRCGHCGRRLHVAYSGTDGYCVRYDCRGAHLNHGTERCISFGGLRVDAAVAEEALRFLAPLGIEAALRAIDAREADGSETRRQAELALAQACYEAELARRQYDAVDPDYRLVAAELERRWNDRLVEVHRLEERVAALRTGQTAALTAEERARLMALGADVAALWHHPGATAETRKRILRTVIAEIVAKVVDDTIELVIHWQGGDHTHLSVPKNRSGKHRWRTDADTGDLIRALARQQPDRGIAAILNRAGKRTGKGNTWTEARVRSFRNAHGIAVYREGEMTERGEVTLEQAADRLKVSTMTVLRLIAGGTIQASQACKGAPWAILEAQLSGLEPLRPSVRRPVTDDPDQQTFDFQ

SEQ ID NO: 3316 - protein, 686 aa, Artificial Sequence
  Description of Artificial Sequence: Synthetic polypeptide
MMHEKIGPHHLERKAILYVRQSSAHQVLHNRESSTLQYAMRDRLTALGWSRIETVDDDLGRSAAGGVTRAGFDRMVAEVCLGKVGAVAAREVSRFARNSRDWQQLIEMCRVVDTVLIDQEAVYAPRQGNDRLLLGLKGSLNEYELDLLRQRSLSARYEKARRGELVVTVPVGFLKVGDRIEKDPDRRIQDAIALVFNKVAELGSARQALLWFLEHGLDLPVRRADGDVIWRRPNYATIHRMIANPIYGGAYAYGKSRSVPGYGGRSGIRRKARDEWLALIPDAHEGYISWERAEEIRKMVSDNVPASRHHGAPKHGDALLAGLFRCKRCGRKLTVRYTGANDNIPRYSCWRGLLDNGEPRCIAFGGLRVDDAIEEAVLGVVEPGAIAAAIEAERRMASQRDQVQDALLRDLEAARYAADRAFRQYDAADPENRLVTSELEARWNTALARAGEIEAKIAKHRTVAPQPIPMSASQVAALAGNLRAVWTAPTTDARLKKRIVRTLINEVVADLDDGTSEIVLVIHWVGGVHTELRLPKRRRGQRNATPDDIVDAVRQLVLIANDDVIAGVLNRNGLTTGNGNRWTRERVTALRSYRKIPVFRPRVDGEPWLNLGGAAKLLGITPKTLRLAAEAGQIEGAHPLPDGPWIFSRSKFATPQAHQILDRARQNPRHPTGSHPDQENLFPSTT

SEQ ID NO: 3317 - protein, 686 aa, Artificial Sequence
  Description of Artificial Sequence: Synthetic polypeptide
MSTDNAMKISADHLRRDAFLYVRQSSLRQVFENTESTKRQYALRDRAVALGWPIERVHVIDNDLGLSGAQSQDRDGFQRLVTEVAMGHAGIVLGLEVSRLARNNADWHRLLELAAMSRTLIMDEDGVYDAASFNDRMLLGLKGTMSEAELHILKSRLQGGILNKARRGELELPLPIGLVYTPDMRVVLDPDRQIQDTVRMLFDTFREVGSACAVVRRLRSEKILFPRRIRRGIGKGDVLWSEIDHSRVIQILHNPRYAGAFAYGRTRTVYNAKLKSVQQKMPRSDWQVLIPQAHEGYISWDEFERNQTSLEQNAVGFSPGLRGRMPRQGNGLLQGRVLCGRCGARMRVHYEQFEGNLRPYYICNEAVVRHAGKACQWARGPAIDEAVSALLLEAMAPTAIEVALAVQEEISQRVEQAASLRDKQLQRARYEAELARRRYLKVDPDNRLVADALEADWNGKLRDLDTLQREHERQNETDQSLLDGAMQERIRALAADFPRIWNNERTSPVERKRMLGLLIEDVTLLVDEKINMHIRWRGGRTQSLAVARPRPMAVIRKTPEAVVALINELLETDNDQQIASRLNALGHRNWRGEAFTLKKVMLVRRAYGLKTRFERLRDSGMLTGEEVARRFGVSATTVHQLGRDGVLKRHRYATNHRYLYEPPGNVRLAKGVGGRYGSRQPRLIDA

SEQ ID NO: 3318 - protein, 685 aa, Artificial Sequence
  Description of Artificial Sequence: Synthetic polypeptide
MRRLKTKAQYQSPGDPRNNALRGRAVALGWRDEQIIVIDNDQGESGASAAWREGFQRLVSDVGMGHAGIVMGLEVSRLARNNADWQRLLEICALADTLILDEDGVYDPASFNDRLLLGLKGTMSEAELHVIKARLRGGILNKVRRGEFRCLLPTGLVYDHFGHVTLDPDMQVRETIIHFFEMFSRLESASQTVKVFRNEGLLFPSRLHNGDTLFRPLTASTAMRVLNNPRYAGAYTYGRRQFRRTIDGKKTLRARDIDDWPACMPDAHPGYISWERHQENLKILKANGRGFEAARASIPREGPALLQGRAVCGQCGNHLRVRYAARRGRQEAWYICNRDHIYRGEPMCQSIAGPPVDEAIGMLIAEQMTPAAVELALDVRKEIQARHEEADRLRCRAIERAQTEADLAQRRFMLVDPNNRLVADTLEGEWNEKLRILANAREERERGREHDQFILDKAVHERLVAMTADFNELWKDPDTPSRERKRLLAHIIEDVTLLKLPAEGTTKLHVRFKGGKIQTLTTMNPQSSAQQIKTKPNIVELIDKLLDDYIYPEIAEILNEQGHRPGGTARRGCHDARFTPLKVAYLIHEYKLQSRYDRLRQRGMLTRQEAAVHLNISEQTVARWAKYGLIARHAYNGHYSLYEIPDGDLPQKQCSRWNQLQDRTAARQQTQTEPRTSTGEERGVV

SEQ ID NO: 3319 - protein, 685 aa, Artificial Sequence
  Description of Artificial Sequence: Synthetic polypeptide
MTHVDLPASLLKRKAVVYVRQSTPAQVQLNRESQRRQYELVEEARRRGFRDVEVIDDDLGRSASGTVARPGFDKLVAWLCAGDVGAILCLDASRLARNGRDWHHLLELCGLVEARVIDLDGVYNPCRPNDRLLLGMKGSISEFELNILRTRMYEAVRSKARRGELRIGVPIGYIWHREIGLGLDPDARVQEAVRQIFSRFRQLGSARQTHLALHREGMHFPRPSDGRKLTALDWTPIRYRNVISVLKNPFYAGAYAYGKSKSRTAVVDGRAHKTYGHIRPLDEYDVLLKDHHEGYIDWGIYERNQKQLAINAYGQRDGAKSGRGGRSLLIGLMTCGQCGHRLRVAYRGRYPYPVYQCIGRRAHGLPRCMCFGGQRVDTAIARELMRVVQPIAIQAALVAERTHMETQREQQRILELELQQARYEASLAERRYAACDPDNRLIAAQLEKNWETSLRRVSEYEARLDDIKTHNSATPTPDFTGLAEDLDAAWSSSSVTMRTRQQLVRALINDTTVNIDEADCEIVLTIHWKGGRHSTLRLRKPQSGEHECVTSDDALAIIESMASRCEHIAATLNRMGLPTAQGKSWTAKRVGSIRRVRGIHAYKSAEKDGEWLTLTEAAKASNVTAHRIRSLIAAGILPAQQVVPGAPYQINASHLRDPRVATAMRRKGRPCQSPPESQIPMFTDT

SEQ ID NO: 3320 - protein, 683 aa, Artificial Sequence
  Description of Artificial Sequence: Synthetic polypeptide
MKALGQAIVYIRQSTAGQLANNLESQRRQYGLADWARQLGWNDVAVIDDDLGRSGGGVARPGFEKLLAAICEGRVGAVVSIEASRLARNGRDWHTLLEFCGLVGTLILGEDGVYDPRHPNDRLLLGMKGTMSEMELSVLRQRSLEALKQKASRGELFMTVAIGYVRIGNNRIEKDPDRRITEAIALTFARFAEMQSVRQVHLWLRQERIPLPAVTYGAEGRLIEWKLPVYNTILHILTNPIYAGAYAFGRTGSRVSIEAGRKRVVRGFKKERKDWEVLIPNHHEGYLSWADYERNLGLIADNANGKNPMSRGALRRGEALLAGLLRCGHCGRKLHVAYSGANGNTGRYHCQGGFINHGGDRCISFGDMRIDRDIGAEVIVRLQPLGIEAALAAQALRSRANEDKRRQIALALEQARYEVGRARRQYDAVDPDNRLVASELETRWNERLTIARDLEAELEELTASPAAEPAPADRERLMMLGADLQRAWTSAGVTPEAKKRIVRTVIDEIVVRVEDNALDLVIRWHGGDHSALKVKKNRTGQHRWSVEGETIDLVRVLARQMPDKAIASVLNRAGKTTGRGNGWTQSRVCSLRSHNTIPTYREGERRERGEVTLDEAAAALSVSPSTVRRLIKDGQLSANQLCKGAPWIIHAADLDRNDVKGAATARRLRRPPSSNPLQKTLEL

SEQ ID NO: 3321 - protein, 677 aa, Artificial Sequence
  Description of Artificial Sequence: Synthetic polypeptide
MAEITIIQPREQPRRKLRCGAYCRVSTGREEQQHSYEAQRLWFMTLLGGSQTEELVDIYADIGISGTTTDRPEFMRMLNDCRHGCIDRILTKSISRFARNTRDCLAILRELRELGVTVFFEKENIDTARTADEMMIAIMGGLAQEESQSISRNIRWSLHRKMAAGTLGVARVPYGYDKVNGRLVINDEQAAVVRRIFSLYLGGMGARRIAALFNSEGLPAPESTAWNNITVYKMLAQEMYLGDIRWQKTVSVFMGTSHPNTGQANSFYVSGSHEPIIDRETFESAQALRLKSVRPAEKTNNSPFRQKVVCGICGRSYYLIGAARPYWQCTRRFDLVKPCTNDILHDETLSDLWRVIWTKFTNHADDVLLPLIGQLERIAEKVSENAESGRLDEIMQQKMTLRKMCAEGLISYGEVITSETELNAEYSSLIENCRKQKEHNSLLINEVKTLYKAVSAAHSDCCADILKSIRFAHDTADFELVSGIHIIMSIPKHKKRIITSHNPINAIRSLALCGGCGGRLSRRKVEGVYLWKCSNRRCSYWRSKHTDEDMIGNTTDVFSKVYADPRLVSLKCSMTEYRPTESVLTMLESLEKLIALGENAEMLIKAAVHLAEEKIGCIEYNVKTEQTAHIEDAIKNCVELPEFLIQAVRHIYVTPDRVRVKFINGKTVKSERSTNHE

SEQ ID NO: 3322 - protein, 675 aa, Artificial Sequence
  Description of Artificial Sequence: Synthetic polypeptide
MSNTDLIPTALLARKAIVYVRQSSQSQVMTNLESQRRQYDLVDVARQHGFSDIETIDDDLGRSASGTVARPGFDRLVALLCAGQVGAVLCFDASRLARNGRDWHHLLELCGLVEARVIDHDGVYNPCRPNDRLLLGMKGSISEFELGVLRARMLDAARSKARRGELRLSVPFGYIWHREAGLGLDPDLRLQDVIRSIFTRFHELGSARQVLLSMTKDQVHFPRPSDEGRMTSFVWMPVRYRNVIGILKNPFYAGVYVYGKSEKRTAIVDGRARRTYGHGKPAGTWEVMIRDHHEGYITWDEYERNQQQLALNNYGRSGGTKSGRGGKALLSGLLTCGRCGRRLSVAYTGNPQSRPVYRCDKPNLMMGLPRCMTFGGPRVDAAVARELLRAVEPLAIEATFEAERMHRERQEDQRHIHDLELRQARYEASLAERRYAACDPDNRLIAAQLEKNWETALRRVRDLEVRKPADSPSTIEVDPDTFTNLADNLQAAWDSPDVTMRARQQLLRTLIADIVVDVDDAVREVVLTIHWKGGQHSELKVRKPQSGEHGCATTEDALAVMRSMAGRWSDEHIAASLNRMGMPTGQGKTWTAHRVASVRRVRAIHAYKSADKDGEWMTMTEAAAALGVTNHRIRHLIKTKVLSAEQVVPGAPYQIRASDLAGTVRNSVRWAGFIS

SEQ ID NO: 3323 - protein, 656 aa, Artificial Sequence
  Description of Artificial Sequence: Synthetic polypeptide
MWLIERSHVHVAFGRVQVIDEDLGKSGAGGVDRHGFQKLIAEIGLGNAGLVVSLDASRLARNNRDWHQLLELCSVFGVVIADGERLYDPRAYHDRLLLGLSGIMSEAELHQLRMRLHQGERQKAARGELRLPLPAGLAYDRTGTIILNPDEEVQARFHLVFAKFRELQSARRVMRYLDRNGLSLPVRPLLGPSPHEVVWRAPDSARVLNILQNPAYAGAYVYGRRQKDPSRCRPGSLTGTVKVAIADWAVCLHAAHPGYISWEEFMANQGRLADNVCRYEAGHSGVPRKGAALLQGIAVCGRCGRRMSMRYTGPHADYPVYCCRSDRDQQGSALCQEVRALAVDALVERIVLDALVPDQIEIALATAGQLEQENRQLERQWALRVERARYEAERARRQYDAVEPENRLVARSLERAWEDKLRVVEAVEQQHARWRAQEPLLIGPTERAGLQALGENLPRIWNAATTSAADRKRILRFVIREVVLDQKRTRGQVWFKIVWQTGATSEHHVQRRVQAYRNYIDIDRLRQRIVELNAEHKMDGEIAAILNQEGFVAARGCAFKGENVWLLRTRWSIPTVKINGVDKNPMRWPDGSFSIQGAAAELCVTPQTVFDYLARGMLTGRQLTKGQPWQIELSDEQMSQLRNRVRRTKRSKKEAS

SEQ ID NO: 3324 - protein, 651 aa, Artificial Sequence
  Description of Artificial Sequence: Synthetic polypeptide
MSKITADHLSLSAFVYVRQSTAYQVANNLESQRRQYGLVERARQLGWETVEIVDDDLGRSGGGIARPGFEKLLAAICEGRVGAVVSLEASRLARNGRDWHTLLEFCGLVGTLIVDEEAIYDPRSPNDRLLLGMKGTMSEMELSVFRQRSVEAMRQKARRGELHLTVAVGYVKTDDARVEKDPDRRVQESILLVFRKFAELQTVRQVLLWFRQENVLVPSVNQGRGKPPIEWKAPVYHTLHHILTNPVYAGSYAYGRRGTRVMIKDGRKRVIRDTLRRNSKDWEVLIHDHHEGYISWAEFERNQHLIAENANGKSYIGRGSIRRGEALLPGLFRCGRCGRRLHIQYSGKGGNTQRYVCRGTFGDMAAANCIGFGGMRVDRAVAQEVLERLQPLGIEAALQAMEAHTQRHSDKRQQLENSIKQAQYEAARARRQYDAVDPDNRLVAGELERRWNEKLIQLRDLEIELETLSTDRDMPALSADDRARLMKLGRDLGQAWDSPSVSIETRKKIIRLLITEIVVDLVRALARQLPDLSIAAILNRSGKRTGHGASWTRSHVCSLRNIHGIPVYREGERAERGERTLDETADILKVSRATAYRMVSSGVLPARQLCAGAPWIIQLSDLQDDTVRREADARRSRRPISQDPVQNPLLF

SEQ ID NO: 3325 - protein, 629 aa, Artificial Sequence
  Description of Artificial Sequence: Synthetic polypeptide
MPAGLRPARASAEWKRRLDRWCATRADAALSGRDEFNEARLPRIDSLNRASTPQDRWTMSTKAQSATSNTPRIYTYARFSSLQQADGSSIARQDAYAEAWAKQHGLILDRSLRMEDRGKSAHKGEHVKKGGALGAFIERIKAGDVVPGDTLIVENLDRLSRQSAQDAQTQFNAIVNTYGVDIVTMHDGVRYNREELARDPSPLFLALAVMVRAYDESSRKSSNARGAYRDKCERWLKGEYRGLIGQPRHIRASDGKLIKGTDPIWILYDTEAKRFELVPEKAAAMQRIIELYRQGHGSVEITRRMETEGLTISDKRAVVRIHKLITYPALKGDKVVVVDGQTYTLKGYYPPVVTETEFDELQLLVGKRGVRKGKGKVPAILTGMKMCYCGYCRQLMVGQTLTTTRADGTTHQNFRRLRCGSYANRAADCRGGASCSGVPVEKAIMTFCANQMNLDHLFTGNDKSDPLMRQLTAKRASLAKTDLKLKGIKDEMLNGDALPSTFREVLRELETNKRTLTQAITKLERELSINSAAQPAPAETWAELVSDVMALDYDARMKTRRLVQETFERIDVFSKGFECDGEHMAVRVTSKRGVVMGFEFNRRTGELIEATKTRKSKPLPKPARTPRMK

SEQ ID NO: 3326 - protein, 629 aa, Artificial Sequence
  Description of Artificial Sequence: Synthetic polypeptide
MMHEKIGPHHLERKAILYVRQSSAHQVLHNRESSALQYAMRDRLAALGWSQIETVDDDLGRSAAGGVTRAGFDRMVAEVCLGKVGAVAAREVSRFARNSRDWQQLIEMCRVVDTVLVDQEAVYAPRQGNDRLLLGLKGSLNEYELDLLRQRSLSARYEKARRGELVVSVPAGFVKAGDRIEKDPDRRIQEAIALVFNKVTELGSARQALLWFLEQGLDLPVRCANGDVIWRRPYYATIHRMIANPIYGGAYAYGKSRSVPGYVGRSGIRRKARDEWLALIPDAHEGYISWERAEEIRKMVSDNVPSSRHHGAPKHGDALLAGLFRCKRCGRKLTVRYTGANHNIPRYSCWRGLLDNGEPRCIAFGGLRVDDAIEEALLGVVEPGAIAAAVEAERNMANQRDQVQDALLRDLEAARYVADRAFRQYDAADPENRLVTSELEARWNKALTGVGEIEAKIAKHRTVTPQPFPMPASQVTALAGNLRTVWTAPTTDARLKKRIVRTLINEVVADLDDGASEIVLVIHWVGGVHTELRLPKRRRGQRNATPDDIVDAVRQLVLIANDDVIAGVLNRNGLTTGNGNRWTRERVTALRSYRKIPVFRPQIDGVEPWLNLGGAAKLLGITPKGDVTL

SEQ ID NO: 3327 - protein, 628 aa, Artificial Sequence
  Description of Artificial Sequence: Synthetic polypeptide
MRKNEKITALYERLSRDDFGKDDDQQRESNSISNQKAMLEEFAARQGFTNIVHFTDDGISGTCFDRPGFLAMMKEVEAGNVEYLCIKDMSRMGRDYLKVGQIMEILRQRGVRLIAINDGVDSARGDDDFTPFRNIMNEYYARDTSRKIRSTFQSKGKSGKHLTGTVIYGYLWNEARDQWLVDPEAAEVVKRIFSMTIDGYGPYQIASKLKSEKVLIPSAYLAQHGEGVNKNKTFKDVYGWGSSTICNILEKREYLGHTINFKTRKHFKDKKSHYVPEDEWTIFENTHEPIIDQQTFDLVQKIRGNVRRYPDGWGEAAPLTGLLYCADCGGKMYVHRTNNGKRISQYTCSQYTKVPCGTLCKTQHRINEDVVLSLVSEMLKAIAEYAKHDRAEFVRVVQEAQSSQQTTEVRKQRTRLATAKQRVSELEVLLCKIYEDNILGKLSDSRYATLDAQYEKEQSELTAEISVLEKAVKSYEKHEKDADRFIALIDKYENFDKLTIAMLNEFIEKILVHERDRKGSIQTTQEVEIYFNFVGRFVPPAFGEVELTPEELEEIRKREERKDRLHQNYLKRKASGAQKRYEDKIKKRKKAEIEAKKAAIRAEDIAKGVFVPVSSLPQREPMKGVQTA

SEQ ID NO: 3328 - protein, 628 aa, Artificial Sequence
  Description of Artificial Sequence: Synthetic polypeptide
MRKNEKITALYERLSRDDFGKDDDQQRESNSISNQKAMLEEFAARQGFTNIVHFTDDGISGTCFDRPGFLAMMKEVEAGNVEYLCIKDMSRMGRDYLKVGQIMEILRQRGVRLIAINDGVDSARGDDDFTPFRNIMNEYYARDTSRKIRSTFQSKGKSGKHLTGTVIYGYLWNEARDQWLVDPEAAEVVKRIFSMTIDGYGPYQIASKLKSEKVLIPSAYLAQHGEGVNKNKTFKDVYGWGSSTICNILEKREYLGHTINFKTRKHFKDKKSHYVPEDEWTIFENTHEPIIDQQTFDLVQKIRGNVRRYPDGWGEAAPLTGLLYCADCGGKMYVHRTNNGKRISQYTCSQYTKVPCGTLCKTQHRINEDVVLSLVSEMLKAIAEYAKHDRAEFVRVVQEAQSSQQTTEVRKQRTRLATAKQRVSELEVLLCKIYEDNILGKLSDSRYATLDAQYEKEQSELTAEISVLEEAVKSYEKHEKDADRFIALIDKYENFDKLTIAMLNEFIEKILVHERDRKGSIQTTQEVEIYFNFVGRFVPPAFGEVELTPEELEEIRKREERKDRLHQNYLKRKASGAQKRYEDKIKKRKKAEIEAKKAAIRAEDIAKGVFVPVSSLPQREPMKGVQTA

SEQ ID NO: 3329 - protein, 618 aa, Artificial Sequence
  Description of Artificial Sequence: Synthetic polypeptide
MNVHLKVQSHHRERSAYLYIRQSSMRQVIDNTESAMRQYALRGRAIALGWREEQIIVIDNDQGESGASAVWREGFQRLVSDVGMGHAGIVMGLEVSRLARNNADWQRLLEICALADTLILDEDGVYDPASFNDRLLLGLKGTMSEAELHVIKARLRGGILNKARRGEFRCPLPTGLVYDHSGNVALDPDMQIRETIAHFFETFSRVGSASQTVKAVRQEGILFPSRLHDSQTVFRPLTPSTAMRVLQGRAVCGQCGRHFHMRYAARRGRQEAWYVCDRARSNRGEHVCQAIAAPPVDEAIGMLIADQMTPAAVELAIEVRKEIEARHEEADRLRCRAIERAQTEADLAQRRFMLVDPNNRLVADTLEGEWNEKLRILANAREERERAQEHDQFILNKAVHERLVTMTADFKKLWTNSETPNRERKRLLAHIIEDVTLLKLPKRGTTKAHIRFKGGKTQTLVTISPKSPSQQVKTSPDVIQLIDKLLDDHIFSEIADILNNQGYRPGSVTRRDQRNARFTTKRVTYLVREYKLRSRYDRLRDRGMLTKKEAAAHLNIHEHTLARWAEHGLVTSHAYNGHYYLYELPKSDLPQKQCSRWNQLVDRLAAHKENARHAKTFN

SEQ ID NO: 3330 - protein, 616 aa, Artificial Sequence
  Description of Artificial Sequence: Synthetic polypeptide
MNLSQREHIANVVASVEQAAATQVLNPQGSDAVQASWLRCVNHHGLDPSRLQEARILPARQLREHCQQLEALRVVAQPGLEKLYQQIAPAGYILLLADAQGVAVDYLGNANAEISLRRAGLFLGAQWSEALSGTCAVGTALATRQAITIHQTDHFDATHIPLTCSAVPLFDSQGDLQAVLDISALTSPQPRSSQHLVLQLAQQQAQKIENAWLLHRHRHDWVLKLSRHPGWHDIEPEFLLAFDANGRLTGLNPAARHWLSAHPQPLGLPLSALFPGPLEQLLSTPQLEDISGQQRFYAQTVHPARPASTAGVTLSPKLAALSGGDPQLDQQLRRAGRLLDTSLHLLVQGETGSGKEYFARAFHQASQRRKGPFIAVNCAAIPASLLESELFGHLPGSFSGAGSKARPGLIQAAEGGTLFLDEIGDMPLEMQTRLLRVLAEQEVLPIGARQPQKVDIRVLSASHHPLTQRVAAGLFREDLLYRLQGACIQLPPLRERQDINWLIDQMLAGQAQLSPPARHALLSYRWPGNLRELHHALQYALAMCESGIIAMDDLPDTLRVTAPAQPVAVNDEQDALLRQLRAARWNMSETARQLGISRMTLYRRLQRLGIQLPERQ

SEQ ID NO: 3331 - protein, 612 aa, Artificial Sequence
  Description of Artificial Sequence: Synthetic polypeptide
MVVKPRPSLSKPRCVIYARVSTDKQAKQNISIPDQMARARVYADLQGWQVVGEYVDAGASGRDDTGRPQFREMLAEAKKKPRSFEFIVVHSFSRFYRDQPRSELERRELKRNGVQVRSLTQEIEDDGGGGTLALSVMGLIDEYFSREQSKHVRRAMEENARQGFRSGGTAPFGYEYKVAEMRGERAKKKLTINEAEAATVREAFELHAAGLGIAKITDRLNEKGSRTRSDRLWAKNVIHAMLSNETYVGRNYYRPTDPITEEKLPREGWITVPCPPIVSEALFESVQEQMRMRAPEITAPRLTTSPVLLSGIARCGSCLAPLQLATGTSWTKDTYRYYKCSGKVRIGACAGGKPVSISEGLLDDLVLTTLCESLFTADRLASIVKSWIEVRSKDRSAASSRLSSLREQLKGTKKRERNLWDLAEKHGLGLEEDFRQRLTEIVEERNNLTRLISLQEALVSETIKPLSKAEAGRIASELREGIQHPDVDVRRRYVRAFLSCVVVYEDEIIIGGHNSSVAEAASGCDLHPLDRTALVRASVQDWLGTFPGELPTPRSAIALIEPFCDVPADLAAALETDRLKTLAQQDSPGQAEAKRLLIRGEPAQPRPSEPKD

SEQ ID NO: 3332 - protein, 606 aa, Artificial Sequence
  Description of Artificial Sequence: Synthetic polypeptide
MNTKVKLIKASNLGARNRNALHLDLKRVAAYCRVSTDSKDQLESYKSQVDYYTNLIKNNKNWTLAGIYADEATTGTTATKRADFMRLISDCQNGDIDMIITKSISRFARNTLDTLKYVRLLKENNVGVVFEEENIDTLTMDGELLLTILSSVAQQEVENTSAHVKKGLKMKMEKGELIGFQGCLGYDYDPITKSISINEEEAKIVRYIFKRYLEGNGGSVIGRELEEQGYLTPRGKTKWSDTTVLGVIKNEKYIGDILMGKTFTVDPITKRRLANFGESDKYHIENHHEAIISKEDFEKAQEIRLRRAQNRNTIANKDRKREKLSRQYAFSSMLECGFCGEILSRRTWHTSSIYKKINWQCVKSTKKGKKYCPHSKGIQEAAIEKAFVESYRQLCHADSTIIDDFLKIVEEEINDETLVKDLKKLENQLNRIISQERKLVDLHLEDSIDEEVYAKKYKKLTKQKEELLDEKKTLELTIKDEDSIKERLKQFKKVLENREIIEEFNRTVFESIVDKVVVGRIDKDGTVHPYDLTFYFKTGVKDSQDSNNFKDKRKNAKDNDINKLCSYKNDEDKKLCSQSKDNACGDGSSVVQTKHRTSFRYRNRGR

SEQ ID NO: 3333 - protein, 591 aa, Artificial Sequence
  Description of Artificial Sequence: Synthetic polypeptide
MTRVALYARYSSDNQRAASIEDQFRLCEERAAREGWQVVDYYRDAAISGASMILRPGIQTLLRDAQAGQFDIVLAEALDRVSRDQADVATLFKRLQFAGVTIVTLAEGEISELHVGLKGTMNALFLKDLALKTHRGLRGRVEAGKSGGGLCYGYRVVHQMDARGELIRGEREIDPVQAEIVRRIFHEFASGRSALSIASRLNDEGIPSPTGGKWNNTTLRGNALRGTGILNNELYIGRLVWNRLRYLKDPQTGKRVSRLNPQSEWIVTEVPDLRIMDDDLWQAVRARQALIAEKSVNISAGIRASLNKLNGQRRPRSLLSGLVFCGVCGGPCSIRGGDRFACSTHMDNRSCANKTTIRRPELEDRVLSGLKDRLMTPEAAAEAMRAYVEETNRANHERRASTAGWQTELTRLRKGLKQMLQVIEDGGYTRGMVERMREMEAREDEVVALLAAQPQDVPDIHPNIAAIFKHKVERLAETLNHPEDRQDASEAIRALIEKIVLHPGKGRGEMHATLHGELGNLLDFAASRGQGTKNTNTPGARAPGVSVSGIAGTHNRRKLRSASNEQATLVAGACNRRKLLLVSGFVERLVA

SEQ ID NO: 3334 - protein, 577 aa, Artificial Sequence
  Description of Artificial Sequence: Synthetic polypeptide
MRTPHLRAVSAPQTLQVALYARVSTDQQAEHHTIDSQLAELTARAEQDGHDLRDDLRFIDNGHSGASLIRPALEHLRDLVALSAIDLIYVHAPDRLARSYAHQVLLIEEFAHAGTQVVFLNHPIGTTPEDSLLLQLQGMFAEYERAKVLERSRRGKRHRAQTGAVSVLSRAPFGYRYITREAGGGDARYEIDEEAARIVRQIFTWVGHERLTLAGVCRRLHDSGLPSPTGRRHWSRAMIHSMLLNPAYAGQALYGRRQSVPWRPPLHPPRGHDGLPRRPWRQVLATPERHISIAVPAIVGEELFASVAEQLEENRRRSRERLAGVQYLLRGLLVCQKCGYGFTGHHHRGQWRYYRCCGTDRSRFHGAFRCDARLVATELLDEAVWTEVCRLLDDPARVIAEYQRRLDAVQATPHRLELDALGRQRAKARRAIERLIDSYTEGLIEKPEFEPRLAALRRRTARLEAEAKAHQEADEQVRSLHLVIGKLDLFAALVHDRLAGADWTTRRDIICTLVKRIEVADDVVRVIFRVDPGVSGPSEAGRTLHHCPTRPHYAMSEGCAGWAGAEPPAQGTSHAAE

SEQ ID NO: 3335 - protein, 577 aa, Artificial Sequence
  Description of Artificial Sequence: Synthetic polypeptide
MSDRRIALYARVSTEQQARDHTIASQVAALHERITADEQSLAPEDAYVDEGYSGSVLVRPALERLRDAVATGEIERVYVLAPDRLARRYAHQVLLMEEFRRAGAEVIFLNHAIGGTAEDDLLLQIQGVIAEYERSKILERSRRGRRHAAQSGLVSAFTTGPYGYRYVPKALGGGVARFEVVPEEARVVRLIFAWVGLERISLREVCRRLQQAGVVTRRGSTRWYASTLGGMLTNTTYIGRAIYGHARYVFGPPKLLRPLRGHPHPCRRPSVRVKVPREEWIEVPVPAMVDPAVFEAAQMQLQENRQRKRESRAGPRWLLQGLTVCRRCGYAYYGKTAPQSKRDPAKGVYCYYRCIGTDGYRFDDHAVCDNPQIRGDYLEQAVWDRVRALLEDPDRMAGEYHRRLTQTQDRTGSSDYVLQLERQIARLQRGIGRLIDSYAEGVIEPAEFQPRIAGLKTRRARLEEQRRVAVEEAQAERELTLMIGRLEEFATRVSDGLDELDFAGKQALIRTLVRRIEIDRNHVEVIFRVPPPTPEGSSPSEPHPHSETWHHCTSDNDAEGCKSLHLTAKEAVARNGL

SEQ ID NO: 3336 - protein, 575 aa, Artificial Sequence
  Description of Artificial Sequence: Synthetic polypeptide
MSKGNRVAIYARFSTDLQREASIEDQLVSCREAALRQGWQVVAEYSDRATSGASMFRAGIEALQRDAKAGRFDIVLSEGMDRLSRKLSDISRFHERMEHAGVRIWTITEEDVDDMKIGLKGTMNAMQLRDIALKTRRGQRGRVRQGKVAGGNSYGYDVVAGPADGKGRTEGGERAINPGKAAVVRRIFEDYARGLSPRRIAEALNTEGIPGPRGRAWGASTLHGNRERRTGILNNELYIGRLVWNRLQYRKDPDTGKRMSRPNAGDVLVTTDVPHLRIVDDDLWQRVRARQGALTSKGTQVAVWDRRRPKFLFSRLMKCGCCGSGVSKEGRDGFSCSAARSKGAAVCTNRTVIKQADLEGRVLHALEHHLMDEAAVRIFCEEYAAERNRLAAGATANRKGLEKELAQVKRDHAKLVDAIIAGVPVEQVKERMNALDARRKELERQLSAEAAPDPVRFHPSMSGAYRERIGALIRALREPEGMEEAKEAIRAMVEKIVLTPVMGPDGKTELAIDLHGALASLLRLATGLPMADVPRRAAGGANSVTASDGVSEAVEFVDKLVLVAGAGFEPAAFRL

SEQ ID NO: 3337 - protein, 571 aa, Artificial Sequence
  Description of Artificial Sequence: Synthetic polypeptide
MPDNRKYAIYSRKSKFTGKGESIENQIEICRRALKSKYDVVDEDIVEFEDEGFSGGNTKRPKFQEMMERYRNGEFQLVICYRLDRISRNTSDFVNTYEELKEHSVCFRSVSDNIDDTSPMGRAMMMISSVFAQLERDIIAERITDNMHELAKSGRWLGGNPPTGYRSAETVGSMTVDGKIHKARMLEKNPEEAELVRLVFTKFVELRSITKVETYLLNNDFKSKKGNTLSRFAIKTILQNPVYAIADEDTWVYLNEKDMQLYGSRDDFDGIHGIMAYNKTIQKKGRSMKQKAPSEWIVAVGKHEGIIEGKRWVEVQHLLEKNRDKAYRKPKSNTALLSGLLFCACCGSFMRPKLSSRVNKQGEKVYDYLCELKERSHGLKCDNKRINGNELDRQICDEIKHLGEDDSGLMKLLRNSQKSLNETFADSQAEIDRLTEKKKQYEAERTNLVKALTFAGETMAAEDIISQINDLHTKTSELERQISEHRRLMENSDITDEQYHSLADMLSSFAKTIDTLDVMKKRDVIRCLVRRVEWDGENIHLYLMGEESGGGTDVLHSEPKCECSKWKMELI

SEQ ID NO: 3338 - protein, 570 aa, Artificial Sequence
  Description of Artificial Sequence: Synthetic polypeptide
MLVAIYARHSTDKQDTSSADQVARCIQFCADRGWTVSHIFADEALSGATMSHRENAKALVAAALAGEFEKVLSEDLSRLSRSQSDIAALYEKLRFMGIDIETIADGTINELHIGLKGTMNALYLRDLADKTRRGLRAITLRGKIPGGLCYGYRTKHRLDEKGELVRGEREIHPGEAEVIRRIYSEYHDGAILSEICEGLNDDGIASPRGGTWSISALVGTASRQTGVLRHTLYKGWITWNRQEYRVNPETGKRNCVVRPQSEWLRIPVPELAIVDEDLFDAVQRMIEDRSSMRHIRAADAKARSRERAMERQRKARSLQMKTGQTGSWFFTRRLRCAETGHPLTAAPPGYYGSRRTALWMIPRETIIVQGLEALNTVDLDTIRTFQETLSPDRQRHESAIERLQQQIDQATDEVKALLSDLGNRTNRPVIRSFLDDKEKQITNARLQLYTHQRELDKLIFRTDLANESLNRWKRLLARLKHDPSDGLSTVLVRTCINRLLVHVERNADDEPVRLWCTADINVPELLKLNTAIMPWDLIPEPWSRAATVELKDIPKPAKAKAKAKQKKKTV

SEQ ID NO: 3339 - protein, 568 aa, Artificial Sequence
  Description of Artificial Sequence: Synthetic polypeptide
MLVAIYARHSTDKQDTSSADQVARCIQFCADRGWTVSHIFADEALSGATMSHRENAKALVAAALAGEFEKVLSEDLSRLSRSQSDIAALYEKLRFMGIDIETIADGTINELHIGLKGTMNALYLRDLADKTRRGLRAITLRGKIPGGLCYGYRTKHRLDEKGELVRGEREIHPGEAEVIRRIYSEYHDGAILSEICEGLNDDGIASPRGGTWSISALVGTASRQTGVLRHTLYKGWITWNRQEYRVNPETGKRNCVVRPQSEWLRIPVPELAIVDEDLFDAVQRMIEDRSSMRHIRAADAKARSRERAMERQRKARSLQMKTGQTGSWFFTRRLRCAETGHPLTAAPPGYYGSRRTALWMIPRETIIVQGLEALNTVDLDTIRTFQETLSPDRQRHESAIERLQQQIDQATDEVKALLSDLGNRTNRPVIRSFLDDKEKQITNARLQLYTHQRELDKLIFRTDLANESLNRWKRLLARLKHDPSDGLSTVLVRTCINRLLVHVERNADDEPVRLWCTADINVPELLKLNTAIMPWDLIPEPWSRAATVELKDIPKPAKAKAKQKKKTV

SEQ ID NO: 3340 - protein, 567 aa, Artificial Sequence
  Description of Artificial Sequence: Synthetic polypeptide
MKVAIYARYSSDNQRDASIADQLRMCRLHAEKQGWHVVEEYTDHAISGASLIRPGIQALMTDAMAGRFDVILSEAMDRLSRDQEDIAGIFKRMSYADVKMFTLSEGEVSHLHVGLKGTMNALFLKDLADKTRRGQRGRVEAGKSGGGNSYGYDVVKKLDANGEPIRGDRTINENQAAVVRRIFHDYAAGKSAKTIAFALNKDGIPSPSGGDWGFSTINGNPKRGNGILNNEMYVGKIVWNRQRFVKDPNTGKRQARPNPESEWVIQETPELRILDDDLWNAVKARQEKNKLTRDDNGSTDVRTVNHRRRPKYLFSGLTKCSCCGGGYSAISATLIGCSTARNKGTCDNRVNIRRDELESRVLNALRTRLVDPELFAHFCEVFTQEMNRLRMEGRVGIASAEAEIAKIDRELETLLNLILKGGAADALNAKMVSLEKRKKELELFLAEADEPPPLLHPSMALQYRKRIQQLYESLQDEEEGKRVEAADTIRSLVDQIVLTPVEGKVEIDVQGDLAGILTISTQTKNPAGERGGSQVKMVAGAGSNLHLLPEQVKMVAGTGFEPVTFRL

SEQ ID NO: 3341 - protein, 566 aa, Artificial Sequence
  Description of Artificial Sequence: Synthetic polypeptide
MQEKRVIVIEPTQVIHEDINGLPTLKPKLKVCAYARVSTDSEDQLHSVEAQKSVYTQKIQENEDWDFIGLYADEGLSGTSIQKRPQFLQMIEDAKAGKIDLILTKSLSRFARNTVDTLTIIRELREINVDVFFEKENIYSSDTKVDFMLTIFSSIAQEEARNISENVKWGFRKRFKEGKVHINTKRFLGYDKDDDGNIVINEEQAKTVRIIYDMYISGSSLKEIVLFLTENELQNGRGEIFWTPATVSAILTNEKYCGDAVLQKRVTIDYLTHKSVKNDGHAPKYYIMNNHEPIVSRTKFELVQELKKKRGRKRKQSNYGNIYPLSGIVFCGECGAVMNRSYYNYGKATERVVLTCRKNNKEHICSNKPIDNDTLEKAIVKSIKELELSKDTFIDETLEIVRSCLSSSELETEISDLKKQITKTEKSIKDIIDLNVNSIADNTEFYKSIYNEKKAQLIDLKAQLNNKKSSLVNGHLHEERIQEMKEFLDGNIGLNKNILMGTYKFIIALSPSEVLLLISDTPMTKKSIKNELDVYKAMPSIYTDKVKSMNEKYDITYHVVDLREQE

SEQ ID NO: 3342 - protein, 564 aa, Artificial Sequence
  Description of Artificial Sequence: Synthetic polypeptide
MSLPSHGFTILRNAPDSARGATARSARRAAGAAEPMPTGSGRQLAVLYARYSSAKQNPMSCEDQLALCRETAANLNFEIAAEFFDAAASGRTLLRNRPGVCEMKARVAKGDVAVLIVEGIERIGRRARDIAEVSEWFESQNVDLVAANGGRIPWKLVPFHGAIAEFQSRETADKTRRGQVGTTRRGRVSAGLAYGYRVAPGAAEFNRVIDPAQAEVVRRIFEDYAAGLSPRQIVSTLNAEGIPSPTGMAWNDSTLRGNAQTRDGILRNEAYVGTLVYGRNRFTRDPDSGNRLSRPGEANSIVYVDRPELQIIPEDLWNRVQERLEKAYKLRVAQKRQLNETHRARHLLTGILRCGCCGGSITIVNGERYGCYNRKSKGLSVCGNRRTILRPKLEEAVLARIRAGLLTPDLARHFAAEVRRLWEEQSAGQTNAPARLKTDLARVKRSIENLINRLEGDDPGPHILERLRDREAEAARLTTELAALEAPAKNRQPPSAEELVAAYRGHVDRMESLLRDPAMIVEANDLLRHMLGHVSVHPDADRPRGFRIEITGDLLTFLLPSASK

SEQ ID NO: 3343 - protein, 564 aa, Artificial Sequence
  Description of Artificial Sequence: Synthetic polypeptide
MRRAAVYARFSTELQNEKSTEDQIALCRAYAARNGLAIVAVYEDKARSGSSILGRDALMRLMEAAGQNAFDIVVVEALDRLSRDMADLAGLHKRLSFLDIEIQAVHDGIADAVLIGIRGLVGQMQREDGAKKVRRGMAGVVRDGRHAGGRAYGYRPVFGRPGELEIVEQEAEVVRRIFAAYAAGRTPRDLAGDLNRDGIAPPRGIHWNGSTINGNAQRGVGLLFNELYVGRIVWNKVRMLKNPDTGKRVSRPNPKDQWQTKEVAHLRIIEDETWHKAQARKAVRVNATSHVKRRPAHLLSGLLRCGVCGSGLSVHDRDKTGKTRIRCSAVRESGSCSNRRIIYLPEIEKAVLDGMRDQLKAPDLIEAYIRRYNQERRELSAQANAMRTALQGKRDRIEGERQRTIDLVIRSVIAEEDAKQRIAELKTQLSEVEAQLSGLDEPPSPVALHPATLQRYIETVDGLSKALADHATAADDRGPLIQNLRGLVHSVTVHPKRAREGFEIEVKGKLAALIGGAAFPTARYTEKPTGLGSRFNAAVTYDSGLEVVAGEGYRQFTAATEFVC

SEQ ID NO: 3344 - protein, 564 aa, Artificial Sequence
  Description of Artificial Sequence: Synthetic polypeptide
MPRVALYARYSDDKQSPASIDDQFLICREQAAREGWRIVANYKDAAISGASVILRSGIQSLLQDAQMGRFDILLAEALDRVSRDQADVATLYKNLQFAGVKIVTLAEGEVSELHVGLKGTMNALFLKDLAKKTHRGLRGRVEKGKSGGGLCFGYDVVRRFSSEGEPVHGERSINAAEAEVIRQVFRQFANGLSPHAIACRLNDSGISAPTGKLWTSTTIRGHAKRGTGLLNNELYIGKLVWNRLRYLKNPQTGKRVSRINPKSEWIVTEVPDLRIVDEELWQAVKARQENIAIQYADVIEATRSAHTALNRTHRPKSLLSGLVYCGCCGGPYSLRGQGRFACSNHVDTKSCSNGHSITRDKLEARVLDGLRDRMMTPEVAAEAIRTYVEESNRINHQRRASEVADRTDLQKVLKAIKGLVTLAKEGKGTRALVDELLELEAQEDAIRARLAATPADVPDIHPNISEIYRRKVDRLTHALSQPEECQEAADALRALIERIDLTPGAKRGEVNAVLYGEFGRILEWIEQRRLAENAQSPGALAPGPCGMSVSVVAGVGFEPTTFRL

SEQ ID NO: 3345 - protein, 558 aa, Artificial Sequence
  Description of Artificial Sequence: Synthetic polypeptide
MLKEKIKVYLYTRVSTSIQIEGYSLEAQKSRMKAFAIYNDYEIVGEYEDAGKSGKSIEGRKQFNRMMEDIKSGKDGVSFVLVFKLSRFARNAADVLSTLQIMQDYGVNLICVEDGIDSSKDAGKLMISVLSAVAEIERENIRIQTMEGRIQKAREGKWNGGFAPYGYKLEDGKLFINEEEAVAIRTIFDQYVNTTIGANGLSKYLENHGIRKIPRQNGKNPLFDAGLIRKILKNPVYNGKIAFGRRTLEKVHGTRNEYKQVEQDEYLISEGIHEAIVSDEVWQAAQVKLKSQAKKYEHVNKGKDTRTHLLSGIVKCPICGVGMFGNKCTKKKKDGTKYKDFYYYGCKHRQMIRGHKCTFSKQIREELLDDAVAEVIVKIVSNPKFASMMQEKINMKVDTSEIEKEIDNYQKELRKSHSTKFKLIEEIDNLDVEDKHYKRRKQDLDDRLYRMYDKIDELESSLIDAKAKKQTIEAEKLTGDNIYKVLIYFDKLYKVMNDVERRQLITALISEIQVYEEKQPNGQWLKSITFKLPIIDDDLNISLDNDEQVEAIALIQKM

SEQ ID NO: 3346 - protein, 558 aa, Artificial Sequence
  Description of Artificial Sequence: Synthetic polypeptide
MRTPHLRAVSAPQTLQVALYARVSTDQQAEHHTIDSQLAELTARAEQDGHDLRDDLRFIDNGHSGASLIRPALEHLRDLVALSAIDLIYVHAPDRLARSYAHQVLLIEEFAHAGTQVVFLNHPIGTTPEDSLLLQLQGMFAEYERAKVLERSRRGKRHRAQTGAVSVLSRAPFGYRYITREAGGGDARYEIDEEAARIVRQIFTWVGHERLTLAGVCRRLHDSGLPSPTGRRHWSRAMIHSMLLNPAYAGQALYGRRQSVPWRPPLHPPRGHDGLPRRPWRQVLATPERHISIAVPAIVGEELFASVAEQLEENRRRSRERLAGVQYLLRGLLVCQKCGYGFTGHHHRGQWRYYRCCGTDRSRFHGAFRCDARLVATELLDEAVWTEVCRLLDDPARVIAEYQRRLDAVQATPHRLELDALGRQRAKARRAIERLIDSYTEGLIEKPEFEPRLAALRRRTARLEAEAKAHQEADEQVRSLHLVIGKLDLFAALVHDRLAGADWTTRRDIICTLVKRIEVADDVVRVIFRVDPGVSGPSEAGRTLHHCPTRPDPAPDVA

SEQ ID NO: 3347 - protein, 552 aa, Artificial Sequence
  Description of Artificial Sequence: Synthetic polypeptide
MKVALYARYSSDNQRDASIEDQLRLCRLHAEKQGWTVVDSYTDRAISGASLLRPGIQELISDAMRGKFVVVLAEAMDRLSRDQEDIAGLFKRMAFGGVRIVTLSEGDVTHLHVGLKGTMNALFLKDLADKTRRGLRGRVADGKSGGGLCFGYDVVKQFAANGEPIRGDRTINEAEAAVVRRIFADYIAGKSSRQIAFELNKEGVPGPQDAEWGPSTIHGNPKRGVGILNNELYVGRLVWNRLRYLKDPDTGKRVSRLNPESEWVIQEVPEMRIIDQKVWNAVKARQKSLAYETSEPGENPLNERRRPKHLFAGLVKCGCCGGGYTMISKDLLGCATSRNKGTCENRLNIRRDALEASVLSGLRTHLMEPQLFKEFCDEFTREVNRLRIERSADIISQRKELERVQRDLDRAIQAILDGVPGGQLKDKIGSLEARKAELTGLLANAEEPPPLLHPNMAEIYRQRVAALYESLLSADGTAEAAELFRTLVDQVTLVPNEAELEIVLRGDLAAILRFAANKKNPDFLAEAGVLGALLSQESLVAGIGFEPMTFRL

SEQ ID NO: 3348 - protein, 550 aa, Artificial Sequence
  Description of Artificial Sequence: Synthetic polypeptide
MLCYSYVRFSTPDQAKGDSYRRQMEFASNYCKLHNLTLVEDLSFKDLGVSAYKGNNLKNGALGKFLELVVSGQIPCGSTLIIESFDRLSRQTAIKAQAVFFEIISAGITIVTAMDNRSYNLQSVADNPFDLMYSLMIMIRANEESETKSKRVKEAIKSKIDNKKIIPSKLPYWIKHNKNEDILELIPERAQTISYIIERYLSGFGINKLTRHLNETIPPFAGKSWYPLYLQKLLRSVSLYGERQFNMNDTLYIMDDYYPAIIDKSKFAVIQENLDSRAPTRGGKIPSAITGIRKVYCGYCQGVLVSQSTKRNGKIVDGLRRARCGTNNNAGSCITSSFRISIVESAIAEYCSQHFDLSLLAPESNSSKLDLAKYRLELKQLDTIIANYVKFISDGNISPAIISALDETEKNKKNLQQKIQKAELNTLANSKSEIAAKWKTIKTNLSVYDEENILKLRELIRGSIKRILVFQYGPWANTGPITTSSGKIIQPYKGNFSIQITFNNGVRKTLELGENVKDQEVDTINRTITENGNTYTPDEYILMIQKTLTK

SEQ ID NO: 3349 - protein, 550 aa, Artificial Sequence
  Description of Artificial Sequence: Synthetic polypeptide
MPVEFLTDEQAAAYGTFGEVPTRPELERFFFLDDDDRDLIALRRSDGHRLGMALQICTVRYIGTFLGDDPLAVPWEVVDYLAGQLGIEDASCVKSYAERRMTPYNHAQEIRERFGYHDYGDRKWSREFRTFLYGRAWTHAEGPVALFNHAVTWLRRHRVLLPGVSVLARQVSEARTVAERRLYESVAKATHKADRTLAPALVGLLERPEGKRVSELERLRMTDPQTAQASDADDVERHPCPRCHAQPGSPCRSRSGAVAGTYHTGRFTKVPRLAKLLRVPTPADRGPGQPWRPGTPIPAPVDPDTPSTDIRIGYARCSTLGQELDSQLDALAAKNIPRDKIFAEKISTRVRVRPKFEAALAAAREIKAHAPHCRVIFTVYEMKRLGRDAAELTALADHLAAHGLVLEMLAGPLAGIYDPTGHGRLLFAFFAAMAETERENIRESTLEGLDAAARKGKHGGRPPVITDDMLHTVLRRRANGETVEQIQPDLIIPTGRRKGQNPSLSSIYRALAEHEKQQTYPDAVAQAHADFAALQSAGSIPGQMAGSMVS

SEQ ID NO: 3350 - protein, 550 aa, Artificial Sequence
  Description of Artificial Sequence: Synthetic polypeptide
MNAVEIIDFNKLESKDRLKNVCAYARVSTKKELQETSLDLQVETYTKMIMDNPKWNFVGVYSDVGKSGTDTKYREQFNQMIELAIAGGIDLIITKSISRFARNTIDCLNIIQELKRHNIEVWFEKENISSFDPKVELTITIYASVAEEESKINSENTKWGVKKRFEDGIVPMVTSRVLGYKRDQNGNIAVDEDEAKIVRKVFNLYSKGYSQGYIAEELNKEGHITKHYKLAYSSGTIRGILNNEKYTGNALLQKSIRRRVGDKTGEKNQQTHPKYYVENSHPKIITKSLWDKVQSIKSQRMMKYNHTTDILELKKRAKNRSIYSGFVECFVCGKNYHYKVNNKREKWATEILICSSNREKKTCENDSLFVETFDEQLLSQINYVIKNKYEFLNKLNEVLTSHPEIRELNIEINTLEDKLDEIHHQIKSLALLEGDFETLVLDQLKTQKSNIEMKLTANKNKLLTSHNIESKIKHYKLLLKEFKKPIDDLSVFPFQDLFDKVLVNERNDIEFILNPFNTISSKSIYSFPEIITPYKIRKTLFETTSKISCF

SEQ ID NO: 3351 - protein, 548 aa, Artificial Sequence
  Description of Artificial Sequence: Synthetic polypeptide
MNIHSPTTTARAALYLRVSTARQAEHDISIPDQKRQGEAYCEQRGYQLVETYVEPGATATNDKRPEFQRMIEAGTSKPAPFDIVVVHSFSRFFRDHFEMEFYVRKLAKNGVKLVSITQEMGDDPMHQMMRQIMALFDEYQSKENAKHVLRAMNENARQGFWNGARPPIGYRIVAAEQRGSKIKKKLEIDPLHADTVRLIYRLFLEGDGTSGAMGVKAIATYLNERRFFTRDGGRWGLAQIHAILTRTTYIGEHRFNTRSHKDREKKPESEVAIMAVPPLIERETFDAVQARLKSRNPMVTPARVSSGPTLLTGICFCAKCGGAMTLRTGQGSTGATYRYYTCSTKARQGKTGCKGRTIPMDKLDHTVADYIGDRLLLPKRLETVLASVIDRRQERTERRREHLAELQRRITEADQRLGRLFDAIEAGMVDKDDAMAKERMVSLKALRDQAAADAERTQLALDSSGNQGVTPDMLKGFARKARERIRLNDGGYRRDHLRALAQRVEVADDEVRIMGSKSELLRTLVAASSVETAAFGVHSSVLKWRAIC

SEQ ID NO: 3352 - protein, 545 aa, Artificial Sequence
  Description of Artificial Sequence: Synthetic polypeptide
MELKNIVNSYNITNILGYLRRSRQDMEREKRTGEDTLTEQKELMNKILTAIEIPYELKMEIGSGESIDGRPVFKECLKDLEEGKYQAIAVKEITRLSRGSYSDAGQIVNLLQSKRLIIITPYKVYDPRNPVDMRQIRFELFMAREEFEMTRERMTGAKYTYAAQGKWISGLAPYGYQLNKKTSKLDPVEDEAKVVQLIFKIFLNGLNGKDYSYTAIASHLTNLQIPTPSGKKRWNQYTIKAILQNEVYIGTVKYKVREKTKDGKRTIRPEKEQIVVQDAHAPIIDKEQFQQSQVKIANKVPLLPNKDEFELSELAGVCTCSKCGEPLSKYESKRIRKNKDGTESVYHVKSLTCKKNKCTYVRYNDVENAILDYLSSLNDLNDSTLTKHINSMLSKYEDDNSNMKTKKQMSEHLSQKEKELKNKENFIFDKYESGIYSDELFLKRKAALDEEFKELQNAKNELNGLQDTQSEIDSNTVRNNINKIIDQYHIESSSEKKNELLRMVLKDVIVNMTQKRKGPIPAQFEITPILRFNFIFDLTATNNFH

SEQ ID NO: 3353 - protein, 545 aa, Artificial Sequence
  Description of Artificial Sequence: Synthetic polypeptide
MSRPIEAASNVKIIPAMSSEELKQAKYRQTRVAAYCRVSTDHEEQANSYKVQIDYYTNLINSNSEWTMAGIYADEGISGTQTKNRKEFNKMIRKCRQKKIDLVLCKSISRFARNTVDCLEYIRELRLLGIGVIFEKENINTLAMNSEFIISLYGSFAQAESESISKNVSWGIEKSFKEGKVKYVMDKTLGYRMGEDGKPYIVEEEAEIVRRIYRMFLDGLSMQRIADIMQAEGAARRSGCTTWNRSNVNYILKNEKYAGDAILQKSYTIDCITHKRVKNNGEKNKYILHDCHPAIIDRDTYNRTQQELTRRCTIKQRSDKAVTAQGRYASKYALTDIMICGECGTPYRRVVWNSHGKKLPVWRCINRLDHGNRYCKHSPSLNEEHLQQAIIDAINTAYTHNTAFLQSMENNISIVLNDEDKNNTERVRIESRLAEIDKARDDLIHLVTSGSVGEDSLDKEFEALNDEESYLKTQLEAMKSQTEKRDEVRYSIMSAVEGIGEMENTMVDYDEVAVRKMIECIKVLSKTEILIIFKGGYECNAVVEK

SEQ ID NO: 3354 - protein, 545 aa, Artificial Sequence
  Description of Artificial Sequence: Synthetic polypeptide
MPKNNDMASNVTMIPALSPAELKQSKYRQIRVAAYCRVSTDSEEQANSYQVQIEYYTNLINSNPEWTLAGIFADEGISGTQTKNRKQFNKMIRKCQQKKIDLVLCKSISRFARNTVDCLEYIRELRLLGIGVIFEKENINTMMMNSEFIISLYGSFAQAESESISKNVSWGIEKSFREGKVKYVLDKTLGYRMGEDGVPYIVEEEAEIVRRIYVMFLDGMSMQGIADQLQSEGIKRRSGSSTWNRANVNFILKNEKYAGDAILQKSYTIDCITHKRVKNNGEKNKYIVHDCHPAIIDRDTYNRVQQELAKRGAIKKRSAKARTELGQYSSKYALTDILICGECGTAYRRVTWTSHGHKRIVWRCISRLDHGSKYCKHSPSISEESLQNAIVKALNAVYSRNGDMLARMEQNILAVIGDNGDMQKQTAKIQKRLEEIEDERDSLVRQITSGAVDEDALDKNFESLNDEEAYLKTQLDDMQTKAKLSDEKKYALMAVGEELRRHDCHLAEYDDVTVRKVIEVIRVLSKNEVQIIFKDGHEMNVAVEK

SEQ ID NO: 3355 - protein, 544 aa, Artificial Sequence
  Description of Artificial Sequence: Synthetic polypeptide
MTRAVIYARFSTELQSEKSTEDQIALCRAYAARIGLDVIGSYEDKARSGASIFGRDGLMRLMDAARDRAFEVVIVEALDRLSRDMEDLAGIHKRLSFLGVEIHAVHDGTADAILVGLRGLVGQLQREDGAKKVRRGMAGVIREGRHAGGRAYGYCPVPGRRGELEIVEEEAEIVRRIFAAYAAGRPPREIAGELNRDRIAPPRGTRWNASTINGNARRGNGLIFNELYAGRIVWNKVRMVKNPDTGKRISRPNPRDQWQEIAAPHLRIVDEGTWKCAQALKAEKARLSTNVKRRPAHLLSGLLRCGCCGSGMSVHDRDKTGKTRIRCSAVRENGSCSNRRILYLTDVEEAVLKGMTEELKDTRLIETYVRAYNEERKRLAATAISRRTRIERRRDRLEAERQRAIDMLIKGVLREEEGRARLDELRGQVLEAERELSQVGETPQIIALHPATLDSYIATVDRLAAVLTEHAAAEDDRGSLVSTFRALVHGVTVHPKAPREGFQVEVKGKLAALIGGAAFPQAKYSGGRVVAEERLEPPRGGRCV

SEQ ID NO: 3356 - protein, 543 aa, Artificial Sequence
  Description of Artificial Sequence: Synthetic polypeptide
MKAVIYARVSTQDQALGFSLATQKELCEKKARALGALEVEVVEDAYTGTELTRPSLDYVRQLVAAGKVDLVVVYDPDRLSRNLTDLLILCREFDKAGVRLEFVNFDWQKTPQGMLFLQMRGAFAEFEHALIKERTQRGKAKKAASGKIRCYAKPFGYGWDAEGDTLVINPQEAEIVKQMFEWLTDPLEPLTPWQITQKLGQVYPQGPRGKGWVHSSVVRMLKNPVYTGRLRRKDEQPDWKPVLVPAIIDQETFMRAQEMLARSKRFNPKTTRRRFLLQRLLVCGECGRRLTVVTHNNPQRAKYSYYTCPGRYPTKFDDQGRVGRCGLPPWRTEEIDKTVWDTIASIIKNPELFYQYITSEKLETASIPRRRLEEARKRLEQVQRVIERIDRAYFILEALPEEDYKRYRAEQEGELVRIEEDIKRLEAVINAQEQVQKGVEFLRQYAENLARSVDELNFFQKQNITRELVQRVKIYADGSLEIEGYFNLPFTGPGKNVPEHCEELTILTPQKNLKEPPCSSVLTCTHREACLYTYNFLIPAKTK

SEQ ID NO: 3357 - protein, 542 aa, Artificial Sequence
  Description of Artificial Sequence: Synthetic polypeptide
MKKITAIAAKNKVDIHETALRKTRVCAYCRVSTDSLKQAESLETQSNYYEDYIKGNREWEFSGIFADQGISGTATANRAEFNKMIRACQLGKIDLIITKSISRFARNTADCLETVRYLKSLNVGVYFQRENINTKGADSELILSVLSSIAQDESRNISENTKWAFQKKFKQGKIQVNVKRFLGYDKNDEGKLVINPKEAEIVKRIYREYLNGSSLNEIKRGLERDKIKTVTDKEGWQGSTIKGILSNEKYYGNAVLQKTITVDYLTHKRKKNQGEAPKYEVKGSHDAIISKEEFLRVQALINKRALEFGNVPEGRNKYTQRYAFSGKIICGNCGAVFKRRTWNSKAKSKQIVWQCSTYINEGKSKCDMKAIDDATLKAVFVRMFNKLYESKEDFFKTFTDNIDKVLKQSAKCEDVFKIDREIENINEEIKSLVRQQIKGELQEKVFDTKYKILNERLQELKNSKDTVAFDNGKYAETLKRSKEIRRVIEMRETTLTEFDDNIFENLIEKIVALTPTHLEFHLKNGMKVEEEFIKKRGVNGLQ

SEQ ID NO: 3358 - protein, 541 aa, Artificial Sequence
  Description of Artificial Sequence: Synthetic polypeptide
MNIAIYSRKSVFKEAGDSVQNQIELCDMYIKRNFFNNEEIKIEIFEDDGFSAKNTNRPEFKRMIKKIENGEIDKLICYKLDRISRSVADFSTVLDLLQKNNCDFISISEQFDTSSPIGRAMIYIASIFAQLERESIAERVKDSMMQMAKRGMFLGGKPSLGFNVKRIKYMNEEMREKEASVLVPNLKELELVSTIYKTYLECGSVTGLEKILFDNGIKNRNNSYYKTSVLVDILRNPVYVKSNNKVHTYLCDMGMQVCGSPNGNGYLIYNKSNVNGKKKDKSEWICAISKNKGYIEPQLWLEVQKLLDKNKDKKIKRLGTGNNVSLLAGLLKCKVCGANMLPRANGGQYKQTYYICTNKKKRGEEKCTCKNIRVDYVDNAVLDSIKIYSKEVLSKSLDSYIKDNINNNSDDYIKSNIEDQIKEKEIFMNSLIEKLAVSTNERVTGILMDQIDNADTEIRKLKIKLEDNLNEEKENKSIIENIRYFVNNLSSFSKNIEIIDSIQFKRECLSKIIDKVVWDSENFKAIVSYSIDIENNESKKK

SEQ ID NO: 3359 - protein, 540 aa, Artificial Sequence
  Description of Artificial Sequence: Synthetic polypeptide
MKVAIYSRKSMFTGKGDSVENQVQMCKEYAQRNLNIDEFIVYEDEGFSGGNTNRPKFQELILDVKKKKFDILICYRLDRISRNVADFSSTLELLQDNNISFVSIKEQFDTSTPIGRAMVYIASVFAQLERETIAERIRDNMLELSKTGRWLGGQTPLGFDSEKITYFDNDMKERSFNKLCPVDKELNIVKLIYNKYLEAGSIHLTLKYLLSNNIKGKNGGDFASTSINDILRNPVYVQSNDLVFEYLKSKGINVSGNPNGNGILIYNKRNSKFKNKSMELWIAAVSNHTGIIPANRWLAVQHFLDKNSKKENPRKGTSRKALLSGILKCAKCGAPMRVSYGKARKDGTRNYYYTCTMKAHSGKTRCDNPNVRGDHLENEVVKYLKTLNTDFIIQELTAYKKEVAATETTSILKNIKDDIKIKKNDMNTLLNQLSKTESSVASEFILKKIDELGKEIKDLEAKAQNADNEKKENDLSILNIDIVLDSLKEFNVFFDNINDLKNDDYTIRRKRYLLEKIIDKITFNGDTKEISIDLWGSKKK

SEQ ID NO: 3360 - protein, 539 aa, Artificial Sequence
  Description of Artificial Sequence: Synthetic polypeptide
MAFNMRTVGYARVSTEEQGRRGISLETQKSRLKRNGATYIYQDIESGQKSTRPGFLQMIEDAKRGSVEEIIICDVTRLGRDGVVLASTVYELKARGVKWRFLDDNIDLDDPGGTILFFLKAGMSQSEVEKTKHRVKTSFKKLKEKGLPIGTLPYGYILDSLTRKAVIDEIPLLCLISDRPSNWDTPDSKEFYQELYSSNTEYYNFHTHEYINWKSLKNDTRLKSITIADLCRESIDTYIKVKCFRQVCNYFKDKYNLSGIRKGSMKETPRRYMFPFNNLTSFSRWIRNPVLYGHIHYKKEGNKRRDLLRGRIADFTTWAEEYEIKFDSHQRLISKEQEKMLYLISSPRQSLSSKPDKIHSKTDVLFSGLLFCPACKHHLTHRKSAGKSGFNYYFCRTTGCSNTNAIREDNLNKQVINEILNKTQSGQIEDHEKPSKPLEICRLEEEISELDKTLILHPNNQIFIKAKEDSLKKLSELENGYKCFDFYNKSAAEILNHPAMRNIGFLEFLSLEHRKIIYRNLIEFICIQNGKVDFISYNL

SEQ ID NO: 3361 - protein, 538 aa, Artificial Sequence
  Description of Artificial Sequence: Synthetic polypeptide
MRVALYARVSTQRQAQADGVAQQLDRLQAHAASQGWTVVAENIFRDDGYSGASLKRPGLERLRDRAALRHLDRVLITAPDRLARHYVHQVLLLEEITATGCQVEFLDRPMSQDPHDQLLLQIRGAVAEYERSLIAERMRRGRLRKLQAGLLLPWTRPPYGYRVDPDRPRDPAGVRCDEAEAAAVAEMFAWYGEEGRSLYGLAQKLLSDAIPPPRVKGRWNVTTLRGILTNPVYTGEVFAGRIQTAPRRLQAREEWIPVASIPTIVSQESFDRVQAKLAQNRQFARRNNTAHPYLLRALVSCGVCGLSCLGRCLPAGHRYYCCRGKLSPVNSHRDTPCPSRFIPASQVEALVWEDLRQLLTDPEAIRHALERAHGGHWLPQELRARRETLRRGQVSVAQQIERLTEVYLAGVVGLDEYRRRRGDLEQRQQALAAQEQQLAAQTERQADIARLGLSLEEFSRRIRQGLDQATWEQRRQLIEWLVTRVIVTNGEVEIRYVIPTSPAAQTGGICHLRSDYRVLLLQAEAVPACRYPLREDCP

SEQ ID NO: 3362 - protein, 536 aa, Artificial Sequence
  Description of Artificial Sequence: Synthetic polypeptide
MIAAIYSRKSKFTGKGDSIENQIQMCQEYCTRLYGETMEFIIYEDEGFSGGNTNRPKFQELIKDASNKKFDVLICYRLDRISRNVADFSSTLELLQNYNVSFISIKEQFDTSTPMGKAMIYIASVFAQLERETIAERVRDNMLELAKSGRWLGGQTPLGFKSEEIIYFDQDFKERKMHKLTPVSDEMKTVRLIYDKYLELKSLSQVVKYLNQNFIKTKTGKDVWNKSGIQDILVNPVYVKADKNVILYLSDLGMTVVGNPGGKHGILTYNKKRGKAIYRDVEEWIAAIAKHEGVINAKDWLMVQKLLHENKEKAPRLGKTHNALLTGILKCAKCGSNMKVIHGRNKSGKVFYYKCTLKNSSGNTRCDNANVRTDDIEKILKEKLKEYSLNKGLLRKEVEEYKKELLSTKSYEFKNIDNIKKDIDNKKKQIENLVNQMSLSPVAAKYIIPQIENLNREIEDHQKKLIDVETSTNLISQADLSLEMIFKCLDKMQIIDELEDEEVKLIYNVMLDSVLWDGDTGNLTIKFWGDKKKLLL

SEQ ID NO: 3363 - protein, 534 aa, Artificial Sequence
  Description of Artificial Sequence: Synthetic polypeptide
MNTVYTLYRVSTKQQVDKTKDDIPMQREACHEFAEKMGWTIGKEFLEKGVSGFKVSASNRDAIQDLKAAALNKEFDILLVFMFDRIGRIDDETPFIVEWFVKQGIRVWSVQEGEQRFESHVDKLMNYIRFWQASGESEKTSMRIKTRMQQLKAEGSYTGGPVPFGYTLVNTGRLNKKGREVHDLAVDPVEADWVREIFSKTVNEGYGTFRCAELLNKNGVKTHKGSRFTSNSINRILRNRLLTGYVVSGDTESPHLKDLQIIDMTTFERAQKILEQRMKKNEETREIARKTQTQQLLSGIMVCGHCGGHLSTQKHIDRHTRQDGTEYVKVQPKYVCYHKSRGLCQCSGSTTYQVKRIDDAVCELIHDMFAGIKESPDEAVLKKNFDKEMTSYRAKITKLNREAEKQAQQLEKLESEVADSLMGNSRFSPDLLSKVIKSTEENIAETKTAIETLKSEMTGKKKAMESVKPMFEIFAGWAKEFDESTIEKKKMIISQLVSRIEVYKGYKIKVTLNMDYQEFCDNWDTLNSKSTINA

SEQ ID NO: 3364 - protein, 533 aa, Artificial Sequence
  Description of Artificial Sequence: Synthetic polypeptide
MLKQQANNKEKVALYSRLSRDDGLDKESNSIANQREMLKRYAKENKFYVYDEYIDDGFSGTTFNRPALNRMFEDIEAGKVNVVLVKDMSRLGRNNALFMYYVEEVFPDLDVRFIAINDMVDTAQDDNEIMPFKSVLNEYYARDISKKIRSSIRTTALTGGFTGAFAPYGYLVDPENKKKLIVDPETAPIVKRIFELSQQGTSTHQIARILCKDGILVPRAYRAKKKGILEQSKGFTFPTDWVGKNVKMILENQVYLGHMVSHKSQTKSFKNKKIVPVPKEDWIVVENTHEAIIDKETFEIVQKFISVKKQPNKTGKPNIFVGLVKCPDCGRNLAYSNPNGNEPRFRCRTYARNTELCTTHAISYKALYEIVQNDIKNHVNSMEELGDHFIKEMRELSETSGSQKIHQFNQELVSLEKRIDEIDSIFTKLIEQNALGKITDERFSKMSMNYETEQAEVVQSYRELKSKIKSEEEKVQGTDRFLETISKYKDVTELNRSMLCELIDSIYVYQAERIGKERTQKVEINYRFLAVSH

SEQ ID NO: 3365 - protein, 533 aa, Artificial Sequence
  Description of Artificial Sequence: Synthetic polypeptide
MARVSVIPARQVAVINGVQREDKKRVCAYCRVSTDTEEQLTSYEAQVTYYESYIKGKPEYEFAGIFADEGISGTNTKHRVEFNKMIEAALAGKFDMIITKSISRFARNTLDCLKYVRLLKEKGVAVYFEKENIDTMDSKGEVLLTILSSLAQDESRNISENSRWGIVRRFQQGKVRVNHKRFLGYDKDENGELIVNEKQAEIVRRIYKEYLEGKGIRAIARGLEEDNVLTGAWGRKWHDSTIQKILRNEKYSGDALLQKTVTVDFLTHKRVKNKGEVQQYYVEDSHPPIISKETFQRVQEEIDRRANLVGYSEETKSRHTNKYAFSGKIVCGNCGSKFRRKRWGGNEKYKKYVWLCANHIDNGNEACNMQAVDEEKLKVAFIKSINKVIENRETFISNMMENINRVLESKEDSNDLKAINERLEELKVQMMNLVRLNVRNGLDSQIYDEEYQRLEEEMQQLKEKKTKFDNTDLMREKGLQKVKEIKKVLDGREDIIKKFDDELFSQMVEQVKVISLVEVEFVYKIGSVVKEIL

SEQ ID NO: 3366 - protein, 532 aa, Artificial Sequence
  Description of Artificial Sequence: Synthetic polypeptide
MSNIKTAANVTLIPAKEQANSVFTGKKLKVAAYCRVSTDETEQMNSFGVQIAYYTDYIGSRPDWQMIGIFADEGISGTQTENRTQFNRMIELCRKGRIDLILCKSISRFARNTVDCLDFVRELKRLNVAVQFEKENINTLSVSSEFAITLYASFAQAESESISRNITWGIEKSFKEGNVRYQMRYTLGYRLVDGVPQIIEDEAVIVREIFSLFAGGMSLRKIAERLTSEGAARRNGSTVWNRDHVNSILKNEKYVGDAILQKYYTVDCLTHTCAKNNGQKPKYLVQNCHAPIIDRETWDRVQLELSRRSAMTKGNARGGRYRTEYALSELLVCGSCGCNYKRVLWKSGTGKRAVWRCKSTLDGGKARCDSPSLHEEALHSAIVRAINEQILDSSGFDRQSALSADTLESENADLERRIASVSARLGEIEVERNRLLADISAIPADVLGSKLKLLHTEEQELKSKLDELNSKRDSGRHDLYRIKAARNLTHGIEALGEFDNDLVRQVVEEITVKSADKVVVKFCGGEKVTVKV

SEQ ID NO: 3367 - protein, 530 aa, Artificial Sequence
  Description of Artificial Sequence: Synthetic polypeptide
MIGGIYARSSLGQTKQGDTVKHQVQMIQEYAKRLEFNVSFDEKFIYPDDGESGYKTTLLQRPPMKQLLEDIDSGLIDIVFFKGISRFARDSGEAIQTSKRLIQKGVRVISIEENYDSDVSDPTFFQMYAVLAEAESRKTSIRVSLGNKQKSRNGLWAGSVPPFGYIKVKDITDKAKKEELISKGVHPQTLFPHPEKADIIRKIFDMYVNQGFGRKKIVNWVNSQGIKTQYGNKIGDITIKRILMNPAYIGVIVYGKTRYNYIDSDDGLRKIQKVINVDKEDWAICEDAHPPIIEREVFMKAQRLIKQKEKAFNKGRRFNNAKHPLTGLLKCSLCGAPMICQKRTNKKADGTKVTYRYYVCSTYHQKGRDVCPQANINADELEDYIHKQISQQIEKVKNDEYFLEGYSTYNPNEEINSQIKVIDREIEKNTNKSLTLLENKDLYDDQTFRDLNLKLKEEIVRLRKQKDELMDELKFAEEIMTKDDLKAKFDEFLELNLSDISRTREVFHEWINEVRVEDKKVIIDQKFKMI

SEQ ID NO: 3368 - protein, 529 aa, Artificial Sequence
  Description of Artificial Sequence: Synthetic polypeptide
MLVIKSKVVEIIRACAYIRYSSDNQRDESLEAQIRAIKEFGKSNGYEVVKVYQDKAKSATTDKRPEFQQMIKDSGNDVFDAVIVHKLDRFSRNKYDSAQYKRKLKQNGVKLISVTENLDGSPESIILESVIEGMAEYYSKNLAREVMKGMRETAYQAKHTGGLPPLGYDVNSDKKYVINDREAESVRLIYEMYVTGYTQSQMVDELNARGFKTKVGAMFKSNSINSVLSNEKYTGVYVFNKSAKKDAFGKRNSHLQKDSSEIIRIEGGMPKIIEKELYDKAQEILRSRKKSKAVNKAKESYLLSGIIKCGECGYSMYGNRRKPKDKPLYVSYRCGCRKRTSSNVCNNKEIRKEYIEEYVLTELEARIFNDKAIPILVEGINENLRKQNKGDEDKKSVFQKELEEVEKQINNIVTAITNGFMQEEFKIKMEELKDRKIYLEGKLIELEANQSVTKVTEEDIRGLLSGFKEYVITKNIPECKNFIQNFVKEVIVYKTHVEVVFNVGLNLGEDNKYKFSSKSSIWSIRKKHN

SEQ ID NO: 3369 - protein, 529 aa, Artificial Sequence
  Description of Artificial Sequence: Synthetic polypeptide
MRTARAVRMIPATAKLHEPVANNAIGQKRVAAYARVSTDNDEQLSSYEAQVDYYTRHIKSNPEWDFVEVYADEGISATTTKRRDGFNRMIADALDGKIDLIITKSISRFARNTVDTLTAVRQLKEKGVEVRFEKENICTMDSKGELLITIMSSLAQEESRSLSENVTWGQRKRFADGKVSLPYKQFLGYEKGDDGLPKIVKKEAEVVRLIYKLYIEGKTMAGIARHLIEKGIPTPGGKKKWQSSTVMSILKNEKYKGDAILQKTFTVDFLTKKKKVNEGEVPQYYVENSHPAIITPEAFDLVQSEIKKRREAKGYKTGGSCFSGKIICGECGSFYGSKVWHSTTKYRRTIWQCNHKFKNDRRCKTPHLYEDKIKEVFVEAFNEIINNKDEFLQCYEDMTKALTDTSTLDREIAKSQEELEIVAELLRKCVQENANSVLNQEEYQQRYSDLYQRYDNEQKRIAEINDKRREHNGKRESIMEFICRLEQSKTLLTEFDEGLWNATVEAIKVHSENNVSLIFKDGTELELNI

SEQ ID NO: 3370 - protein, 527 aa, Artificial Sequence
  Description of Artificial Sequence: Synthetic polypeptide
MPKVTVIPSTINPITQMPIHANHVKKVAAYARVSTNSDEQYTSYEAQVNFYKKYIQEKPDWEYTEVYADEGLSGTTTKKRTEFNRMIKDALNGKINLIITKSISRFARNTLDTISFVRKLKAKGIEVFFEKENLWTLDPKSELILTIMASIAQEESRSISQNVTWGKRVGFQEGKVSFAYKRFLGYKKEDDKIVIDEDQAVIVRDIYRMFLVEGKTPTGIAKYLKSQHIKTPSGKSTKWQTNVVTSILTNEKYKGDALLQKTYTVNYLDHSKAINTGQIPQYYVENNHPAIIDRDTWEQVQIEIERRNKLGAHYSSSDVFASKLICEDCGSFYGKKKWHTNTKYERFVYQCNSKFHKGKDKCKTPHLNEDDIKRQFIKAYNLMAKDKQRVIKDTKDIIKLLTDTTKIDSEITKIDDEMVVITELVNKLVMENSKTDTDIDAYNKKYEKLSARYDKLKDYLDGLITEKESKLGQKKTMQTFINNLIESEDELVDWNERIWMLMVESAVVHRNQSITFKFHSGVTIKTS

SEQ ID NO: 3371 - protein, 526 aa, Artificial Sequence
  Description of Artificial Sequence: Synthetic polypeptide
MDTERRHGPRQLAAAAIRGRRPCPLLDHRKRLQRARARRMDHRGRGRWPERPPGAHRVRGGRAPRPHPRPGRRPCVHQRPAVEPAVARLGHRGPSDLGADRAPIPERAQSRDDRTRHMAHHPSPPRGPRHRNRAHPHHRGRGRHAGERGRAQRVRVRHGPHPPFGLRGHGRGTGQRPLHPPAAGRRGRRHRPLHRAIRNPHRPPPGQRSEHLRRHGLAGHSGHPRPHRRITRHPGPAHPARERRPPRHRRPNPQGPGPRPGSTPQGPPGLDQGPHRRALRRRSSHRPPLAQHAAPQGGHFRSIRVSTPPHGAPRARENGPMPTPGQQPLPQPGAVVGYARVSTREQTASLDEQRERLTQLGAVRVFEDVASGARADRPGLAAARDFMRDGDTLTVTRLDRLGRSMLDTLTTLRDLDAAGIRVRALDLNLDTGTAAGRMVVHVMAALSEYERELLAERTREGLAHARAQGRTGGRRPSLTPQQVEAITATLAAGMSIRDVATMHGVSERTISRVRAGIYGQSKRPQT

SEQ ID NO: 3372 - protein, 523 aa, Artificial Sequence
  Description of Artificial Sequence: Synthetic polypeptide
MSRTVTAIPATKKPGTVTTPSGVPARRKVAAYARVSTEMEEQTSSYEAQIDYYTTYIRSRNDWQFAGMYCDEGISGTSMKRREGFQTMIDDALAGKIDLILTKSVSRFARNTVDSLTTVRKLKDAGVEVYFEKENIYTFDAKGELLITIMSSLAQEESRSISENVTWGHRKRFADGKVMVPYKSLLGYKKGADGNLVIDETQAPTVRLIYQLFLDGMAISEIKTELATRKILTPRGKEVWSTSTVRSILSNEKYKGDALLQKTFTTDFLTKKMKVNEGEVPQYYVSGNHEPIIEPRIWDQVQYELTTRHGNISSAKVGLFSTRLKCAQCGAWYGRKTWASNTKYKYTVWQCNHKYAVEHPCSSATVKDEHIKNAFVQALNQLIARQSRQSHLLQIFDSMFDTSRMEEQAAACQAKIVELTEQIEALIAENQQRALDQDAYQNKYTELDTAYRKTLACKASLEADIAANTAKHAAVTTALGDLAGEPVSEFRPSQWSALIDHAIVDEDTIRFVFRVGEVVRVQL

SEQ ID NO: 3373 - protein, 523 aa, Artificial Sequence
  Description of Artificial Sequence: Synthetic polypeptide
MEDWRTQDGTDHDPASPIVRAAEYVRMSTDHQKYSTENQAEAIRHYAAAHGIEIVRTYADAGKSGLKIDGRDALKQLIDDVQTGVADYTMVLVYDVSRWGRFQDADESAYYEYICKRSGISVEYCTEQFENDGSPVSTIVKGVKRAMAGEYSRELSVKVFAGQGRLIEKGFRQGGPAGFGLRRTLVDERGETKGILTRGEHKSIQTDRVILTPGPPEEVAIVRDIYHAFVHEGRSEQDIADDLNRRHIPTDLDRPWTRGTVHQVLINEKYAGDNVWNRQSFKLKKKRVRNDPEMWIRAAGAFDAIVERDLFEAAKAIIGARSFRLSDTEMLSALKVLLVSRGLLSGIIIDECEGMPSSSAYSSRFGSLLRAYDLVGYTPDRDYRYVAINQALRKLHPEILGQVLDGLRDMGSEVVQDVQTDRVIVNEEFSLSVVIVRCNPTPTGLLRWKIRFDTSRMPDITIVVRMDTANRAAFDYYLFPRLDLVADRLRLAEDNGLSLDAYRFDTLDLLYEIAAPVAIAEAA

SEQ ID NO: 3374 - protein, 523 aa, Artificial Sequence
  Description of Artificial Sequence: Synthetic polypeptide
MEDWRTRDGTDHEPASPCVRAAEYVRMSTDHQKYSTENQAEAIRHYAAAHGVEIVRTYADAGKSGLKIDGRDALKQLIDDVQTGVADYTMVLVYDVSRWGRFQDADESAYYEYICKRSGISVEYCTEQFDNDGSPVSTIVKGVKRAMAGEYSRELSVKVFAGQGRLIEKGFRQGGPAGFGLRRTLVDERGETKGILTRGEHKSIQTDRVILTPGPPEEVAIVRGIYHAFVHEGRSEQDIADDLNRRSIPTDLDRPWTRGTVHQVLINEKYAGDNVWNRQSFKLKKKRVRNDPEMWIRAAGAFDAIVERDLFEAAKAIIGARSFRLSDTEMLSALKVLLDSRGLLSGIIIDECEGMPSSSAYSSRFGSLLRAYDLVGYTPDRDYRYVAINRALRKLHPEILGQVLDGLRDMGSEVVQDFQTDRVIVNEEFSLSVVIVRCNPTPTGLLRWKIRFDTSRMPDITIVVRMDTANRAAFDYYLFPRLDLIADRLRLAEDNGLSLDAYRFDTLDLLYEIAAPIAIAEAA

SEQ ID NO: 3375 - protein, 522 aa, Artificial Sequence
  Description of Artificial Sequence: Synthetic polypeptide
MKLSHILQPNMKAAFYGRHSTDKQDMDMQLNSVMEVIRKYDCIHTHSFLDKAVSARKNKITSRKELENMFEAAKRKEFDFVIVYKSDRLARDPLEHQTIRIVMKTLDIPIIISSTESVYNTDTDLIVQLMEDGFTKYEVDTIIARTRSGLENKAKQGKWLGGKPPFGYTYDKSSEQFIEHTEELCYVKEIFNLYVNGHGFQYIAHTLPNGSRRGKDWGKENVKAIVLNPFYCGLLSWRRQTDGKQNERDIWIEAPNHYVKPIISRTTWEACWRIYSEKRNGNMVPKHYKTSFLLQGLLSCEKCQELMKTKNQQTVSSTNKKYGGKIYFCPNCKLRIEADLLHDKVVNQTLTDVKISGFHNVYHAIEQKIQYEIQELNNNIQKHQRLYENHIIKLHNITEELKQRMKNNDDKRFLKSLAIYRSDVQRKLDGIIQQINNFKQQITLKEKVEKSKEIWLHTLNEVFQDDVKLQEISDMDKRRFLLPLIQSVSIKENKKRNEYDISLQLRTDFSKRDVKKQISLIL

SEQ ID NO: 3376 - protein, 522 aa, Artificial Sequence
  Description of Artificial Sequence: Synthetic polypeptide
MRDVLEKGKKGAFYARVSSDRQTIDAQRHHVYEFIKNYECEIVKEYVDPGESAFKKKLIKRPQIMALLRDVEQGKYDFVITYADDRLARSEIEHVQIRVIMKEAKTDVILTSTGELYTERDIITQLIREGGTRYEVERISARTKDAYEQRTDYGQWMGGPVPFGYVQDENTKNFFILEDEKEIVLKIYQLYQNGEGFADIAKILNEQKAKTNTIHWKKERVKHILTNPIYAGYVTFGRLKPGSGNSIEGLSKWKMAKCEEIPPIMTKEEWLATFQMFEKKRNKELPPKQLKTEYVLRDLIYCKSCDAPLLPKNQETRGKNGKKYGIKKYMCSNKLCKVWFSTDELHALVFDSVIKEVTDKVISKSQTELMYEMEQILEKDIKQIKKEIQRLKKQVDNCLVWIKDAEREIDELYNQKKKLVKVNPKIDPLLDVMLDYRLHLLHEIRETEELIAKKEAKMKHIEDVDSNQSMLQKNVLQAFRIEFTNLQKDMKRVRQLLVYLIDKIIIDQNGKTEYILKINLEQ

SEQ ID NO: 3377 - protein, 522 aa, Artificial Sequence
  Description of Artificial Sequence: Synthetic polypeptide
MDEVATTLKAPSGRRVVRAAQYLRMSTEHQTYSIDNQRDAIRDYAEIMGYEIVATYEDAGRSGLNLGGRPGLQRLLADVESGRADFETVVVYDVSRWGRFQNIDESAAYEYRCQMAGVRIEFCAEQFANDGSIESDVLKAIKRSMAAEQSRMLSQKVFIGQARLIRMGFRQGSKVGFGLRRLLVDQHGRPKGILSPSEYKSLQTDRIILVLGPPDEIATVRWIFGHFVKTRKTELEMARLLNKRGVLSDLGRPWTRVSVHSVLTNENYIGNSIWNKHSARLRSHQVRNPPELWVRVENILEPIVDRKLFNRAQIVLKTIYRHLTNDEMLAALKALLARRGALSSFIIDAAPDCPPSTRYMSRFGTIVKAYELIGYEPPKNSRYIFVNRRLETMRLQIIEDLLAAVEKRGGIATHVMETDLLRINQEITVAIATGRCRVSSFGYPRWFAKADREPPPDIFVLIRMNPDDLSIRDYLIAPAHEIAGKSELHAINGARLDTYIFPTLNPLIRLAERASVGSAAWN

SEQ ID NO: 3378 - protein, 521 aa, Artificial Sequence
  Description of Artificial Sequence: Synthetic polypeptide
MQSDVPRTEGQEVPIRMRAAEYVRMSTEHQQYSTENQGDKIREYAARRGIEIVATYADEGKSGLRIDGRQALQRLIHDVENKRADFQIILVYDVSRWGRFQDADESAYYEYICRRAGIQVAYCAEQFENDGSPVSTIVKGVKRAMAGEYSRELSAKVFAGQCRLIELGFRQGGPAGYGLRRTLVDVQGAAKTELSRGEQKSLQTDRVILTPGPEEEVRIVNQIYRWFIDDGLVESEIAGRLNGMRLRTDLGREWTRATVHEVLTNEKYVGHNIYNRVSFKLKKVRVVNPPDMWIRREGAFTGIVPPDVFYTAQGIIRARARRYTDEELIERLRGLYRNRGFLSGLVINEAEGMPCAAVYAHRFGSLVRAYQLVGYTPDRDYRYVEINRQLRRMHPDLVQQIEREIANLGGSFERDPATDVLWVNREFTVSIVLARCHAVDSGHNRWKIRLDTSLAPDISVAARLDDGNQAVRDFYLLPRVDFGPSRISLAEQNTAELESYRFETLDYLYGMAARARLRVAA

SEQ ID NO: 3379 - protein, 520 aa, Artificial Sequence
  Description of Artificial Sequence: Synthetic polypeptide
MAGDTEPTVCEGGSHTRAAEYVRMSTEHQQYSTENQRSKIRDYADQHRLRIVATYADEGKSGLRLDGRAALQRLIHDVEARTVDFQVILVYDVSRWGRFQDADESAYYEYVCRRAGINVVYCAEQFENDGSPVSTIVKGVKRAMAGEYSRELSTKVFAGQCRLIELGFRQGGPAGFGLRRVLLDQSGLIKSALGRGERKSLQTDRVVLMPGPESETGIVRLIYQWFIEESLSDAQIAARLNSMNVRTDLDRIWSRATVHEVLTNEKYIGNNIYNRVSFKLKKLRVANPPEMWIRKDGAFKPVLSPDIFYTAQGIMRARAHRYSSEELLERLRELYQSRGFLSGIVIDETEGMPSSSVYSYRFGSLVRAYQAVGFTPDRDYQYVEINRLLRRLHPEIVNNTERLIAEIGGETVRDPATDVLFINREFTVSIVLARCHHVGLGKRRWKVRFDASLLPDITVAIRMKDGNDLPYDYYLLPRVDFGQRDIQLSERNSVELETYRFDTLDYLYRMAERARLRRVA

SEQ ID NO: 3380 - protein, 520 aa, Artificial Sequence
  Description of Artificial Sequence: Synthetic polypeptide
MTEKNIMVIPARKRVGSTAAKEKIKKLRVAAYCRVSTETEEQNSSYEVQVSHYTEFIKKNNEWEFAGIFADDGISGTNTKKRDEFNRMIAECMDGNIDMVITKSISRFARNTLDCLQYIRQLKDKNISVYFEKENINTTDAKGEVLLTIMASLAQQESQSLSQNVKLGLQYRYQQGKVQVNHKRFMGYTKDEDGNLTIVPEEAEIIKRIYREYLEGQSLVGIGRALEKDGILTAAGKPRWRPESVKKILQNEKYIGDALLQKTVTVDFLTKKRVKNEGHVPQYYVENSHEAIIPKELFLQAQEEIHRRSNIYTGEGKNKRIYSSKYALSAITFCGDCGDIYRRVYWNIHGRKEFVWRCVTRIEQGPEVCKNRTVKEDELYGAVMTAINKLLAGGNNMIKTLEENIHAVIGETTEYQISEINNSLEEKQKELIKLANKGQDYDHLADEIDELRDKRQILLVEDASLSGENERINELIEFIRKNKFRTLEYDDKLVRKIIQSVTVYEGHFVIAFKSGIEMEI

SEQ ID NO: 3381 - protein, 519 aa, Artificial Sequence
  Description of Artificial Sequence: Synthetic polypeptide
MDKATTPPEFERRRARAAQYLRMSTERQIYSIDNQRDAIRNYAEIMGYDIVATYEDPGRSGLSILGRPGLKRLIEDIESRRADFETVVVYDVSRWGRFQNTDESASYEYRCQRAGVRIEFCAELFVNDGSIGSDVLKAIKRSMAAEYSRMLSNRVFAGQSRIVKLGFSGGGPAGYGLRRLLVDGSGNPKAILHRDERKGLASDRVVLVPGPENEVSTVRWIFNQFVKKGKTAVEIASALNARGLVTEFGRPWTGACVGTILASEKYVGNIVWNRISHRLLQNRLRNPPSAVVRADNVIEPLVPRALFDRAQAIRRARTYLRPDEELLADLTKLLKERGRLSSPIIDAAPGCHSASIYAHRFGSMNAAYQLIGYDGSANYRKLDIRRRLIQIRQQTIENLMSDIDGVGGSALYDPQTKIMRVNDEFSVAIWTAQYRMNVTGFPRWPFWKRGLIGPEVTILIRMESDNQTVRDFLIAPAHEAQSALHMLKANNGVRLDAFLFASLDPVVEMARREPMPANI

SEQ ID NO: 3382 - protein, 519 aa, Artificial Sequence
  Description of Artificial Sequence: Synthetic polypeptide
MLSRYEGGHHDKEAIAYVRFSTASQQYGDSLRRQNALISEWLSQHPDYELDDITYQDLGLSAYSGMNATRGALYDFLDAVEHGYIAAGTVLLVESLDRLSREKISDATERLKSILRSGVEVVTLCDHTHYSIDSLDDPYVLIKAILIAQRANEESETKSRRMRAAWQKKREDAAATGKLITRSCPRWLTVSPGGEKFELIEEHARTINLIFRLRLKGCSLNGITKTLNERGVPTLTGEIGRWNPSTIESLLGNKALTGTFTPSYQTMAKGVSEIRGYFPPVVPDKLFHDVQGVRLARFGNPGVSENPYLINIFRSLMYCGTCGHSIMLTSVDKKGAGYYACPMRRLHRCSEPAIRRDHVDAALVGVLLCSMDMLQANGTVMGTASQLENRLVELNMSINRLIAALQIAPDVPELAMKVRELSKELRAGELKLRALRNRGVAGSGEWIAGLNLADRRNRERCRDYAARHIDRLFLHTAEGRCDVHLLNGLRLINFPVKKKLPVSSFISSLAYLCGDTLIL

SEQ ID NO: 3383 - protein, 519 aa, Artificial Sequence
  Description of Artificial Sequence: Synthetic polypeptide
MDRATTPPEFERRRARAAQYLRMSTERQIYSIDNQRDAIRNYAEVMGYDIVATYEDPGRSGLSILGRPGLKRLIEDIESRRADFETVVVYDVSRWGRFQNTDESASYEYRCQRAGVRIEFCAELFVNDGSIGSDVLKAIKRSMAAEYSRMLSNRVFAGQSRIVKLGFSGGGPAGYGLRRLLVDGSGNPKAILHRDERKGLASDRVVLVPGPENEVSTVRWIFNQFVKKGKTAVEIASALNARGLVTEFGRPWTGACVGTILASEKYVGNIVWNRISHRLLQNRLRNPPSAVVRADNVIEPLVTRALFDRAQAIRRARTYLRPDEELLADLTKLLKERGRLSSPIIDAAPGCHSASIYAHRFGSMNAAYQLIGYDGSANYRKLDIRRRLIQIRQQTIENLMSDIDGVGGSALYDPQTKIMRVNDEFSVAIWTAQYRMNVTGFPRWPFWKRGLIGPEVTILIRMESDNQTVRDFLIAPAHEAQSALHMLKADNGVRLDAFLFASLDPVVEVARREPMPANI

SEQ ID NO: 3384 - protein, 518 aa, Artificial Sequence
  Description of Artificial Sequence: Synthetic polypeptide
MTGAGDQTHKTENVRAAQYVRMSTEHQKYSTENQAIEIAKYARENGYVIVKTYMDSGKSGLKLDGRDALQSLIEDVSNGQTDFSIILVYDVSRWGRFQNADESAYLEYLCTRAGIAVEYCAEQFANDGSLTTTIIKNMKRAMAGEYSRDLSRKVFEGQRHLVELGYRQGGAAGFGLRRQLIDERGEPKALLAHGERKSIQTDRVILVPGPATEVAVVDRIYRLFVEKGQNECSIAGILNYENLFTDMGRPWTRGTVHQVLTNEKYVGNNVFNRISFKLKMHRVRNPPDAIIRASGVFQPIVSEDLFQRAAAIIAKRTVRLRDDEMLALLTQLLLKSGKLSAIIIDEQEGMPSSSIYGSRFGSLLRAYKLIGYTPDRDYRYVEINRLLRTLFPDVVSGIIASVENAGGRIVRDAATDLLKVNGEFAVSVVVCRCIETPAGSLRWKIRLDNGLHPDLSIAVRMAPGNEKILDYYLLPAIDFASANLAVAEDNPIGIDAYRCADLSRFIRLTERVPIRRAA

SEQ ID NO: 3385 - protein, 516 aa, Artificial Sequence
  Description of Artificial Sequence: Synthetic polypeptide
MVIPARKRVGSTAAKEKIKKLRVAAYCRVSTETEEQNSSYEVQVSHYTEFIKKNNEWEFAGIFADDGISGTNTKKRDEFNRMIAECMDGNIDMVITKSISRFARNTLDCLQYIRQLKDKNISVYFEKENINTTDAKGEVLLTIMASLAQQESQSLSQNVKLGLQYRYQQGKVQVNHKRFMGYTKDEDGNLTIVPEEAEIIKRIYREYLEGASLLQIARGLEADGILTAAGKAKWRPETLKKILQNEKYIGDALLQKTYTVDFLSKKRVKNNGIVPQYYVENSHEPIIPRELFMQVQEEMVRRANLRGGKGGKKRVYSSKYALSSIVYCGQCGDIYRRVHWNNRGYKSIVWRCVSRLEEKGSECTAPTINEETLQAAVVKAINELLDNKEPFLSTLQKNIATVLNEENDNATVDIDGKLEELQQQLLIQAKSKNDYEDVADEIHRLRELKQNALVENAEREGKRQRIAEMTDFLNEQSCELEEYDEQLVRRLIEKVTIYEDKLTVEFKSGIEIDEEI

SEQ ID NO: 3386 - protein, 516 aa, Artificial Sequence
  Description of Artificial Sequence: Synthetic polypeptide
MVKSLKPQLDPERVIRAAEYVRMSTDHQKYSILNQSALIHVFAETNRMEIVATYADPGKSGLTLRSRPGLSRLLSDIVAGKVDFEVVLVYDVSRWGRFQDADESAHYEFLCRQAGIRVIYCAEQFGADGHPLASVLKALKRAMAGEFSRELSVKVAAGKARIASLGYRVGGIAGYGLRRQVLEDGQARGMLLRKGQLKYLQTDRVTLVPGPAEEVAVVARIYRDYIYLRKGELQIARALNAEGYSFFGKAWSRHLVRTILTNEKYIGVNILGRTIQRLAAPNINNPPEKWTRFEGAFVPIVSRDLFEAAARVRSFNVKAYTDAELLEALRVALKREGKLTVEIIERDPDLPAASTIRAHFGGVTGAYQRLGFAIGSRYRFYDIERALAAVRKQTQESLMQALEARSIECSVTAPNLIAFADRFAIEVRVCRHREPISYRCSGWRMAHEPASGSSHVLAIRMARGNQAIQDFLFLRRAEIQGVPPFLKASCDDQTAQFRYTDVPAVATAIADIALNL

SEQ ID NO: 3387 - protein, 515 aa, Artificial Sequence
  Description of Artificial Sequence: Synthetic polypeptide
MYHPQELDVFIYLRKSRKDLEEEKKAIEHGQHYDTLERHRTQLLELAHKEHHNIIDIFEEVVSGEYISERPMMQKLLREVESGIADAVLVMDLDRLGRGDMVDQGTIYRVFCYSETFIITPTEIINPNDENQELTFSIKSLIAREELKTIVKRMQRGRRASAKEGKSISRVPAYGYLRDNNLKLYPDPEKSWVIPIIFKLMVNGMGRQAIAQELDRLGISPPKGEYWNPSTISSITKNEVYLGHIIWGKIRYTKQNGKYIRKKVPKERWQRHDNAHPPLVSEELFQKANMAHSKRWRPPTIKTKKLSNPLAGILLCELCGHSMLYQPRKDRPNPQVRCVQPSCKGIQKGAALALVEQRILDGLQQIIESFEIQKNMVEKKQSKNNIQLQQKAVERKEQQVNDLQKQKNKLHDLLEKGVYDIETFLERQKSIVLRLKTTQEEIEQLEQEIKYIAEKEKHMHEFVPKIRNVLEAYYVTEDIDKKNHLLKSVLEKATYLRKTTWNRRDEFVIELYTKI

SEQ ID NO: 3388 - protein, 514 aa, Artificial Sequence
  Description of Artificial Sequence: Synthetic polypeptide
MKLYSYQRWSSAVQEAGTTKTRQEDAARAYALRNGLEYCEIVDSGVSAYRGANKQGALGKFIDAVQQGVIERGVTLYVESLDRISREGINNALRLFQDILELDITIVTGMDGKVFTKQSINDNPFDLMMSILVFIRANEESTKKSLRTNGNAKALVERFKSGQPTNIKSMGGCPFWIDNSMSQYESVQKHVKYWPIAEEIVQQFLDGKSVFQVVKYLNATYPEGCYGKPWNYANVRKVRLSKAIYGVKEITISSTLHTLDNYYPALCTEGEFLRLQVIKDNNKYIGKVGDQKNNINLLCGMKLFRCGHCGSTMMAMKHKNTIRYMCEKGRMDSNGCRLWSFGSLGIEHCLMLVLTYAYIDTNRKGVQNKTDYSTRIASKNEAIDEISKRITNTIELVSMGLSNVEEVKVLIEGLNKQRTVLKTELDVLVTQQALSDSIDFETLMHDFFTHAQYAVLQSVDHEYREELRKVVFAMMDSVIAWKYGKNLYFSFRIKDHDEYFNFVPGTEKNTFRLY

SEQ ID NO: 3389 - protein, 512 aa, Artificial Sequence
  Description of Artificial Sequence: Synthetic polypeptide
MKKMTVIPAVSQIRQGRIRVAAYCRVSSNKDDQEHSYETQVRYFTSLYRGSETSELVGVYADEGISGTSMDKRVEFQRLMEDCRAGKIDRIVTKSISRFARNTKDCLKSIRELKELGITIAFEKENIDTARLSDEMMITVMGGLAQEESQSISNNVRWGIQKKMASGTFGHCRVPYGYTKEKKTGKLIIEPDKAEVVRRIFDMYISGMGARKIALTLTDEGIPSPTGKAWNQKTVLNILEQEKYIGDTLWQKTYSKFMGEKFIPNSGQVPQYYIEGSHPAIISKEKFALVRDMRKASTPQKSTKVESPFRKKLICGKCGHTYALIRSKKRDYWQCGYRYDVGNPCNNTVLYADELQTAFTALCDKLHTHNAEIIGKCYAQLTELQRLMEYGTAEGANQLKTIADLKEQKLRLATLYRKRFITTEKYDREVTEIDMQISSLSRSMDRASENKDKTIDDMETLAELFKGYDGTPEARKEILETAVESITISGDTLTFRLPSGLEFTERLDRNGN

SEQ ID NO: 3390 - protein, 511 aa, Artificial Sequence
  Description of Artificial Sequence: Synthetic polypeptide
MSTDLQRDSPTNQKEVLARYATIHGIHIAATYEDYGKSGLSMRNRPALARLLQDVLDEKRIFSVLLVYDVSRWGRFQDVDESAHYEYVCRRAGVRVVYCAEPFENDNSASSNIMKTLKRAMAGEYSRELSLKVFLGQCRGTREGFRQGAAAGYALQRVLVDFNGNVKGPLHNGERKNLQSDHVVIVPGPAHEVALVRRVYEWFLTENLSPTRIAKRLNDFGLRTDLNRRWLKDAVTRLLTSEKYAGNNVYNRTSVRLHTPRVKNPPEQWVRAVGVFEPVVDRATFDAVQLRLDSRTHLMPDDDLLVKLVALHEKIGKVTAKAITADRSLPGVQTYRKRFGSLTEVYRTIGFDNGHDYGFLRVLRAAKILHSRLSDTVIATLRDAGHEVHHSLDKTLLCVDNEIRIRLNVRPATRTLYKPVRWIIKWPELHPPVDILVLARVDRFAVNFIDFFVLPRGSLGPQKQTELTEKPNPQLEMFRYSDLKILLELTARVSLEVFREPGNAANNYRPD

SEQ ID NO: 3391 - protein, 511 aa, Artificial Sequence
  Description of Artificial Sequence: Synthetic polypeptide
MTEKTKIIVGYARVSSREQAVDSHALEQQIARLKAAGATEIFIDIESGSNDNRPALKKLMNLVELRQVNEVIITRIDRKARSLVKLRECIDIYQKAGVNLRILDQQIDLNTSQGKLMANVLGSLAEWETDALSDRIRHGKQHRRNQRAACESYPWGYQVIKDKYQLDTRLFLCLISDRPDNYLDLYNEDDVTKLPGLTIKQIARDCVDIFLQVQGVSRALKVIFAKYGLPRKHHKRNSRDSILHWTNAGFNNWLTNPVLCGHTAYFQRITISKGKRKKNKPEDWQIIHDTHPEHRLITDAEAVEIQQILKFNSKTGHFSFNQDPNHPVCYREYAYQTGLVFCAECGSKCITKSAKHKKGMYYYFACRYAGMGCGNKKSTRKCNIENALINTLVQRSQSLANELDQQATREQEKSEKLKQLESRLEALEKIPGFDPDLEKLKEKIRLQIAEEVNPFLSDSILSRSTEEIIRAGNNLAIWHTLSPDEKVKIYHQIVHQITIRNAEVEEVILKI

SEQ ID NO: 3392 - protein, 510 aa, Artificial Sequence
  Description of Artificial Sequence: Synthetic polypeptide
MKAAIYARYSSDNQREESIEAQIRAINEFAERENIQIVKTYIDEARSATTDDRPQFLKMIKESELGLFDTLIVHKLDRFSRNRYDSAFYKKKLKDNNVRLISVLEHLDNSPESIILESVLEGMAEYYSVNLSREVMKGMRETALQCKHNGGLPPLGYDVAKDKTYIINPNEAKAVKLIYELYSNGVGYNLILSRLNELGYKTKKGKFFGKNSLYSILTNEKYNGIYVFNKSSKKINGKRNSHKHKLDEEIIKIKDGMPKIIDDDLWNEVKKKMDNNKAHRGAAQAKKIYLLSGLIYCGKCGHAMTGNSRHSGRNKTLYETYECSNRKRTKQCDMRAINKSLAEKIVIDALYDNIFSKKAIENLTRKILTYAQEQNKTITEDIITYKKELKDVDSKIDNIVEAIADGLYSPVMKEKLTSLESKKNALLIRIDEAEREAILTSPSKEMIKKYLSKDSDIKEKTPQQQKKVVQNYIKKVTIYDDEVITDTIVTCLGIGEAYRTRVHKLYITKY

SEQ ID NO: 3393 - protein, 509 aa, Artificial Sequence
  Description of Artificial Sequence: Synthetic polypeptide
MKKAIAYLRFSTSSQQYGDSLRRQNKLVAEWLDSHPNYLLDDLTYKDLGLSAFDGSHAVHGAFSEFMEAVQGGYIPHGTVLLVESLDRLSREKIGEATERLRSILSAGIDVVTLTDHTHYTKDSLDDPYSLIKAILIAQRANEESEIKSRRMKSAWQKKREDAEASGRIITRSCPRWLRVSHDGKSFELIAEHAATLQEIFRLRLEGNSINGITKMLNDRNVVTLTGEAGRWNPSTVEKLLSNKALTGVYVPSYRTIANGIQEIPGYFPRVIADKTFSAVRGFRSRPYGKDKETNNPWLINLFRSVMTCKACGHSIMLNGIDARGMGYYVCPMRRLHRCDAPALRRDIADANLIRTVLAVVDKFQPGRTVKVPVRILQDRNILILKSIDQLVEALQVAPEVTALAERIKALHREFKSNEVTMHALKSRERLATVNDISLLNLALKTDREKCRRFVMRNFRDIRLDTASKTCDILFSNGFRLLNFPLLKSTDPGQLVSALAYTDDETLVL

SEQ ID NO: 3394 - protein, 508 aa, Artificial Sequence
  Description of Artificial Sequence: Synthetic polypeptide
MKKAIAYMRFSSPGQMSGDSLNRQRRLITEWLKVNSDYYLDTVTYEDLGLSAFNGKHAQSGAFSEFLDAIEHGYILPGTTLLVESLDRLSREKVGEAIERLKLILNHGIDVITLCDNTVYNIDSLNEPYSLIKAILIAQRANEESEIKSSRVKLSWKKKRQDALESGTIMTASCPRWLSLDDKRTAFIPDPDRVKTIELIFKLRMERRSLNAIAKYLNDHAVKNFSGKESAWGPSVIEKLLANKALIGICVPSYRARGKGISEIAGYYPRVISDDLFYAVQEIRLAPFGISNSSKNPMLINLLRTVMKCEACGNTMIVHAVSGRLHGYYVCPMRRLHRCDRPSIKRDLVDYNIINELLFNCSKIQPVENKKDANETLELKIIELQMKINNLIVALSVAPEVTAIAEKIRLLDKELRRASVSLKTLKSKGVSSLGDFHAIDLTSKNGRELCRTLAYKIFEKIIINTDNKTCDIYFMNGIVFKHYPLMKVISAQQAISTLKYMVDGEVYF

SEQ ID NO: 3395 - protein, 508 aa, Artificial Sequence
  Description of Artificial Sequence: Synthetic polypeptide
MHQYNIVGYARVSSREQAENCHALEQQIDRLKSAGVEYVFVDVESGANPERLNYNKLIQLVEKGAIKMVIATRWDRLTRNELVYLQLKNLFQYSAVKLKLLDQGDVDLNSAFGELSADMQALFAVHERRMLKERVSRGFEYKRKKKSAWGRQPWGYKSENEKYVIDRSRIICLLSQRPYNYQELSDLPDNSSLLVQGLSKGEIAKEAIEYFLKVRKARDVLRYLYEKYGVSSKANNNNLLLTSQLLFWRSGQSFCEWIKNPVLRGHTAYNKYEPRNAQKRGNQKPPEEWEIHENTHPDERMLSDEEYCEVVTIIEQNSRTMGTMKTRSQLTGLIICGECGSKCINKNNQIYRYYGCRNSGIGCSNKKQIRVDLLEAKLFDFIIEKAHQFNGVDSVSQVIENPEDSSVVIKLKEQKQSLEKMLQDHYNLTIKKAINDLDLQIKKEISHSEIDDFSLATAAEVLVYPYITHLGFWYCLNTQERELIYHKLIKKIVVLDSQVTTIELKVSG

SEQ ID NO: 3396 - protein, 507 aa, Artificial Sequence
  Description of Artificial Sequence: Synthetic polypeptide
MNNMIVVPAAAKVQRGLTRVAAYCRVSTSQENQEHSYEAQVRYFTNLYRSSSTETFVGIYADEGISGTSLDKRTEFQRMINDCRAGKIDRIVTKSVSRFARNTKDCLETLRELKALGVTVAFEKENIDTSRLSDEMMITVMGGLAQEESHSISRNVRWSIQRKMANGTFRHARVPYGYAKDDETGNLIVDPEQAEIIRRIFNMYVNGTGAHKIALTLNDEKIPSPTGIAWNKKTILKILDNEKYTGDTMWQKTYSEFMGEKFKPNHGQAAKYYIEGSHEAIISKELFEMAAKVKKKAAPKSFEKNNTPFRKKLICRKCGHTYTFISSKRRNYWQCNCRSAIDKPCDNRVLYNDELESAFTALCDKLHVHGTVILGKCAEQLAELQRLEQFGTAEGVKRMKELSDLKDQKQRFRGLYDKHFISEEKYQQQIGEIDLKIERLSREMSRLSGANDGISGEINTLLEMFEDYEGSDDDKKEIIESALEKITFVDETLTFRLQCGLEFTEVV

SEQ ID NO: 3397 - protein, 506 aa, Artificial Sequence
  Description of Artificial Sequence: Synthetic polypeptide
MLTVETIARIRREHAKGKSIRAIARSLKVSRETVTKYLRSGETAPRYERQHQPLPKLAGFQEELERLITENERRPARDRLDYLGLFGRLKDAGFQGGYDTVRRYIKRFKQRQPPSGPVNAYVPLTFAPAEAYQFDWAEEWIILDGVTTKVQVAHARLCHSRMPFVAVYPRQTQEMVFDAHARAAAFYGGLCERGIYDNMKTAVDAVFVGKERRFNRRFAQMCSHYLVEPVACTPASGWEKGQVENQVGTLRQRLFTPRLRAKTLEEVNERLHDEVIVWAQQTSHPEDKSRTVWEVFQAERPALITVSDPFDGFHEATLSVSKTCLIHFDRNRYSVAAIAAGKPVQVRAYATRIVVWFNGAIVAEHPRAFGHGHTRYNPLHYLPVLVRKPGALRNGAPFRDWDLPPALATVRTRLGRGDDADRQFVGVLAAILTDGLEAVEVACREALASGTHSRDVILNILARRHDVTPAPAMAVPTALTLSIEPAADCGRYDRLRAVREGCHGTA

SEQ ID NO: 3398 - protein, 503 aa, Artificial Sequence
  Description of Artificial Sequence: Synthetic polypeptide
MNNRIDAIYARQSVDKKDSISIESQIEFCKYELKGGNCKEYTDKGYSGKNTDRPKFQELVRDIKRGLIAKVIVYKLDRISRSILDFANMMELFQQYDVEFVSSTEKFDTSTPMGRAMLNICIVFAQLERETIQKRVTDAYYSRSQRGFKMGGKAPYGFHTEPIKMDGINTKKLVVNPDEAANIRLIFEMYAQPTTSYGDITRYFAEQGILFYGKELIRPTLAQMLRNPVYVQADLDVYEFFKSQGTVIVNDAADFTGTNGCYLYQGRDVKPSKKNDLKDQMLVLAPHEGIVPADIWLACRKKLMNNMKIQSARKATHTWLAGKIKCGNCGYALMSIFNPSGRQYLRCTKRLDNKSCPGCGKIITSELEAVVYQQMVKKLEKHKTLTGRKKAAKANPKIAALQVELLHVDSEIEKLVDSLTGANNVLLSYVNVKIAELDGRKQELVKQIAELTVETISPGQVNQISGYLDTWDDVSFDDKRRVVDLMITTVAATSDSLNITWKI

SEQ ID NO: 3399 - protein, 503 aa, Artificial Sequence
  Description of Artificial Sequence: Synthetic polypeptide
MRLPAQPLPSDLIDALYALPPGDTTGVVYLRISRDRDHDADGEVNQLWDILPLARRMGVRVVGVYLDNDISATTGSRKRTEYYEMLEILKRDSARVVLSWHSDRMHRNNRELEDYIDICEPRGILTHTVRAGTMDLSTAVGQAAARTFTAWAGAQARQTGERLALRQAANRREGRWAGGIRPFGWELDGESLRAAEAAEIRWATQAVVEGDSLRVIARQMNARGSRGTRGKEWIASTVKQILMRPRNCGLMSHEGQIVGRGRWAPAVSEEEWRACVDVLERRGARSVERGGRPPRWLGAMLYICGGCGQPTLRGMPVAGGKGQAKYACAPKVDRLPGVRHVTRQAAALDAWVQEALIERLSRPDAVKLLRRPDHARAEIDVAALHAELARLHGVLEALAEDYADGALTRSAMLLGTERARHRITVVGDELAAASEADPLAAIVGTDVRREWFGTEDGGMPGYSLERRRAILRRLVDVWVMPASPGRRAPSKEWWKDIDLRWKD

SEQ ID NO: 3400 - protein, 502 aa, Artificial Sequence
  Description of Artificial Sequence: Synthetic polypeptide
MEGLVVLKKTVAYYRSSSKKQEHSVRMQKYYAKAYCRDHYMKLDYEYEDPYVSARIIHKNQRSGLRKLLEAIQNDEIEHLILYKRDRLARNVIEYMEIYELLQEKQIKVHFTTVGEPVMEYTPMNRYLEVIMAGFAQHEGEQINKRFDAMRQSKFDAGKAVSRIPYGFQNNKKKKEIEVVKDEMDIVMFIFNEFLNDTCTSLQQIKDSLDGKDFKKRKGLPWELQDIRRTLENSFYMGVYSIRLKGVQQEHQLEGTIPIEPHQWEAAQEKLNRILNKRGSTKMKKEIDKEDILYRMEGLLQCSYCKKQLEGVVKRRRDTFLIGYQCKEHRLYIDKEYIEQKTFEKMKCFFLNLREKEFDGLFQRYYKQNIKEIERIIQGHSQRLDQKKKTVHTKVQRWLTEKKNEKLHKELLGSYQHFQEYKQIKEELELKLNVLKKVPDVVKNLEGNIHKQLMLDSLSDYKSMELFQDLIFTVIVDRHGYEIIFKHPFLHYPEVHTCEDNS

SEQ ID NO: 3401 - protein, 499 aa, Artificial Sequence
  Description of Artificial Sequence: Synthetic polypeptide
MSTEHQQYSTQNQAQTIREYAERRGIRIVKTYSDDAKSGLIIGGRMALQQMIADVESGVADFSVILVYDVTRWGRFQDTDESAYYEYRCRKAGMQVAYCAEQFENDGSPTSTIVKSVKRAMAGEYSRELSVKVFAGQCRLIELGYRQGGPAGFGLRRALLNERGEVKTELKRGEHKSLQTDRVVLVPGPDDEVRTVRWIYSQFLKKGLSETEIATELNARGILTDLGRAWTRATVHQILTNEKYIGNNVYNRRSFKLKRKRVANGPEMWIRSDGAFDAIVEPKQFQKAQAIIAARNRRFSDEVMLERLARLFQRHGYISGLVIDEADGMPSSGAYAHRFGSLLRAYSLVGFTPDRDYRYIEANRLLRQFHGDEIERVIHEITLLGGAVIRNPATDLLTINGEFTASVVVARCRETSSGGLRWKIRFDTGLAPDITIAIRMNRTNTDALDYYLLPQFEMRSKPLGLAEENGLMLDAFRFETLNFFFDMARRVSVSEVTPW

SEQ ID NO: 3402 - protein, 499 aa, Artificial Sequence
  Description of Artificial Sequence: Synthetic polypeptide
MKAVIFARVSSRDQEDGHSLDAQIQCCYEYAIKKNFKVIEQFKIVESSTATGRPEFSKMVNFVKGQKDKIIVLCYGVDRLQRDFDEQYIELQRLIKQGRIEIHYAKSEFIEHKDMDSSDKFRKNLDVLLANDYRNKISDNVKRSARKKLADGTILGDSPLGYLNSKRMDKKKEKVNVYIDPLRGSLVKKMFEDYATGMYSMNEIRLRITEEGLRSKKGCQIGKSQVEQILQNPFYYGYMKYNDILYKHVHPALISKELYDECQLVRQGKRKSKSKRTQKPFVLKGLLKCHHCGCGYSPELKKEKYVYMRPTKSKGDCSYCHHLSEEKILIQIEDVLKGIKIPDNILAELNTELKKSSAAEYEHQIQESNKLQTQYQTIQTRIKRARELFLDAQVSKEEYDEMITGLQAERHNVEVRLQRLTEADDGFNKSLSTIFALASKAHDLFKSSELEEKRRIITILFPNLEMNAGKLMFTTRKPFDVFLNMPHRPKWLPGQDLNL

SEQ ID NO: 3403 - protein, 497 aa, Artificial Sequence
  Description of Artificial Sequence: Synthetic polypeptide
MSTEHQKYSTENQAIEIAKYARENDYVIVKTYMDSGKSGLKLDGRDALQSLIEDVSNGQTDFSIILVYDVSRWGRFQNADESAYLEYLCTRAGIAVEYCAEQFANDGSLTTTIIKNMKRAMAGEYSRDLSRKVFEGQRHLVELGYRQGGTAGFGLRRQLIDERGEPKALLAHGERKSIQTDRVILVPGPATEVAVVDRIYRLFVEKGQNECSIAGILNSENLFTDMGRPWTRGTVHQVLTNEKYVGNNVFNRISFKLKMRRVRNPPDAIIRASGVFQPIVSKDLFQRAAAIIAERTVRLRDDEMLALLAQLLLKSGKLSAIIIDEQEGMPSSSIYGSRFGSLLRAYKLIGYTPDRDYRYVEINRLLRSLFPDVLSGIIAAVEHAGGRIIRDAATDLLKVNGEFTVSVVVCRCIETPAGNLRWKIRLDNGLHPDLSIAVRMAPGNEKILDYYLLPAIDFASANLAVAEDNAIGIDAYRCADLSRFIRLTERVPIRRAA

SEQ ID NO: 3404 - protein, 497 aa, Artificial Sequence
  Description of Artificial Sequence: Synthetic polypeptide
MSTDHQRYSTENQSEAIRDYARARGIEIVRTYADSGKSGLKIEGRDALRQLIEDVQIGTTDFTMVLVYDVSRWGRFQDADESAYYEYICRRAGISVQYCAEQFENDGSPVSTIVKGVKRAMAGEYSRELSAKVFAGQGRLIEKGYRQGGPAGFGLRRTLIDERGQVKGILQRGEHKSIQTDRVILTLGPVEEVELVREIYRRFVHHGESESEIATDLNKRGIKSDLGRNWTRGTVHQILINEKYAGDNVWNRQSFKLKKRHVRNDPDMWVRANGVFDAVIERFLFEAARTVINARSFRLSDEEMLQSLRDLYQRTGSLSGIVIDECDGMPSSSAYSSRFGSLLRAYSLVGFNPDRDYSYVEINRELRKLHPEVLEQVIGALKSSGSEAWQDSETDRVTVNEEFTLSIVIARCAQTPTGLLRWNLRFDTSLAPDITVVVRMDSANQKPFDYYLFPRLDLLAERLRMAEDNALQLDAYRFDDLAILYQIAAPVNLSEAA

SEQ ID NO: 3405 - protein, 497 aa, Artificial Sequence
  Description of Artificial Sequence: Synthetic polypeptide
MSTDHQRYSTENQSEAIRDYARARGIEIVRTYADSGKSGLKIEGRDALRQLIEDVQIGTTDFTMVLVYDVSRWGRFQDADESAYYEYICRRAGISVQYCAEQFENDGSPVSTIVKGVKRAMAGEYSRELSTKVFAGQGRLIEKGYRQGGPAGFGLRRTLIDERGQTKGILHRGEHKSIQTDRVILTLGPSEEVELVREIYRRFVHHGESENQIAADLNNRGIKSDLGRNWTRGTIHQILINEKYAGDNVWNRRSFKLKKKHVRNDPDMWIRADGVFDAVIERALFEAARTIINARSFRLSDEEMLRSLRDLYRQRGSLSGIVIDECDGMPSSSAYSSRFGSLLRAYSLVGFDPDRDYRYVEINRELRKLHPAVLDEVMGALKSSGSEAWQDNDTDHVTVNEEFTLSIVIARCFQTPTGLLRWNLRFDTSLAPDITIVVRMDSANQKPFDYYLFPRLDLLADRLRIAEDNALQLDAYRFDDLAILYQIAAPVNLSEAA

SEQ ID NO: 3406 - protein, 497 aa, Artificial Sequence
  Description of Artificial Sequence: Synthetic polypeptide
MPNASLRAATYRRVSTEEQVSNHSLGNQADKLAAFAEQQGYAVVRDYVDPGHSGATRKRPGLEQLLHDARLGLFDTVLIYRLDRLARSTHLAYSVIQELMDVGVGVRSSSEPQIDSTTPMGKVSLGVTAIFAELERDTFMQRSQEGREKSLAAGIYNGGSVSYGYEIKDRRLVIQPQEAEVVRMIFQWYLEHRWATVRIAEELTALNIPTRFRGDGRLFRGKETLGCWRGGSIYRMLKSRTYIGEFQYGRRTASGKKDPDRVIKVAVPPIVDLEVWEAAQEMMVTNRVTALRNAKNIYMLKGLIRCAACGRSYLGAKTNGWAGYRCCGRVVPGAGPRHLACKNTHVPARMVEDPVWERITAILLDPGEVLGQQPLTLIPAELPLVEKALADARTSRERLTDLYLDANAGLSKEGYLSRLAGIDAQLAGLEARVLVLRDTQAQRRQQEQSEKRIYDLSAQYRDRLEHADDQLRQTLAHQLVKRITVQTDGSVDIEWVV

SEQ ID NO: 3407 - protein, 497 aa, Artificial Sequence
  Description of Artificial Sequence: Synthetic polypeptide
MSTEHQQYSTLNQSDKIREYAERRGILIVRTYADEGRSGLRIDGRLGLQQLIHDVQSGTADFSVVLVYDVSRWGRFQDADESAYYEYICRRAGIQVAYCAEQFENDGSPVSTIVKGVKRAMAGEYSRELSVKVFAGQCRQVELGFRQGGAAGYGLRRLLIDQSGSVKFQLGRGEHKSLQTDRVVLTPGPQAEVDMVLQVYRWFVDDDMSEATIAVKLNTAGISTPTGREWSRAAVHEILTNEKYIGNNVYNRTSFKLKKVHVFNTPDMWIRKDGAFEGIVPRDLFFTVQGIIRARARRFSDEELIERLRRLFERRGFLSGLVINETDDMPSSSVYALRFGSLLRAYQLVGFTPGRDYRYLEINRYLRQLHPRIVAETAAQVAALGGQIVVDPATDLLDVNQEFRASIVLSRCRSNEFGRRHWRVRLDTSLRPDITVVVRLQPENKVALDYYLLPHLQFGASALSLAEQNAIELESFRFDSLDYFYGMAERFRLRRAA

SEQ ID NO: 3408 - protein, 497 aa, Artificial Sequence
  Description of Artificial Sequence: Synthetic polypeptide
MSTEHQRYSTENQADAIRDYAARYNCAIVRTYADEGKSGLNIDGRAGLQKLIADVTGGHADFEIVLVYDISRWGRFQDADESAYYEYLCRRAGVRVEYCAEPFDNDGSLGSDIQKMLKRKMAGEYSRELSVKVFAGQCRLIEKGFRQGGPAGFGLRRQLVDEAGRSKALLARLEHKSIQTDRVVLVPGPSDEIEVVRHIYQSFVEDGRNEGEIAIMLNAEGIRTDLGRDWTRGTVHQVLINEKYIGNNVWNRGTAALKRKRTRNEPSMLIRAEGAFPAIVDRLLFDAAQAIIRGRSARLSDADMLDVLRRLLAEHGYLSGLMIDEAADCPSSSAYRSRFGSLLRTYSLVGYAPDRDFAYVESNRRLRQRNPQVVDEVLAALRAAGASVVLDPETAILTINEEVTAALLLCRCTQTAAGSLRWLIRLDGPVPPDITIAVRMEPGEEAVRDYYLLPSLDGRAARLRLAERNEAGLDTFRFATLEALYELMRRIPLAEVA

SEQ ID NO: 3409 - protein, 495 aa, Artificial Sequence
  Description of Artificial Sequence: Synthetic polypeptide
MRAAGYVRMSSDRQELSIGTQLAAIHGYAQANHIEVVRVYEDAAKSGLQISNREGMKRLLRDVMDEPRPFDLVLVYDVSRWGRFQDIDAAAYYEYTCRLHGAKVIYVQEVFGSDDEPMTALLKTLKRAMAAEYARELGVKTRAGQDRAVHLGYQMGPLPCIGLTRMAVDRVGKRRPLARGQSKASQGERIAWGPGPPAEVALTRKIFSMYADTNATIRGVARQLRAVGTTAQDGRLFTESMVDRLLRCEALAGNFVWGSERYIGGLSRKKRPVTRADNVIEPVVPADLWMRVQAKLWARRRLRRDKEQLLQVLRERLTEHPELNALDLDALGLHSKKAYTNAFGSVSRALELAGRDSGAVRALHERRKLVGRKVGDRMTSDIAGLLQEIGMDCRVHPRSRVLVIGGTVKLRLQLLWPRTYRGVQRWHVLKSRRPVAHLVLLAQMDDGGSATRFVLLNPKEYRETAPWLDEELPPYLEPIATGVELIQALRVRLAQ

SEQ ID NO: 3410 - protein, 494 aa, Artificial Sequence
  Description of Artificial Sequence: Synthetic polypeptide
MIAAVYIRKSREDKNKPSHRLTVQREQLPAYALAQGWQVEIYDDGHASAARGKVEELHERARLESDVRSGKINLILVIELSRLSRDDSLQDYVSWLYLCSQHGVKLATPSRQLDPSQHSDWMLLLMEGGFSSVEMKVLQARMAEGRAEAYRAGKWLSGNPPMPYKYDRGAGGLIVDPDQMPTFRKMMRLAELYPASQVADRVGIPSVTVRRAISDDRLLMYQGARRDPDSGATIDGQWPAVIDHLQAERIRRNRGSRRKAPRRQYAAMLSNLDILTCGYCGHSYRAWKNGRTRVDGTRLDYYGCRHKDKSDACQSRMIPTHILEERVLTNLFGLLSKAAELQRAWEARQDSDDTPGKLADIDREIEKCHTKKQRLVEAVADGLLSPADVRQKRNEIDNTIGTLNQKRAGLLSAQAIAPDWDALKITRQAFDHLYQAEQREVIASLIAQIRIFPTYALITYRFPRNENGDNIARIHLPERQKPAGPRQVYKVKKQ

SEQ ID NO: 3411 - protein, 487 aa, Artificial Sequence
  Description of Artificial Sequence: Synthetic polypeptide
MTRVALYARYSSDNQREASIEDQLRICREQAKREKWKIVGTYKDAGISGASMILRPGIQALLQDAQAGQFDIVLAEALDRISRDQADVATFYKHLKFAGVPIVTLSEGEISELHVGLKGTMNALFLKDLAAKTHRGIRGRVEDGKSGGGLCFGYNVVKQLDARGDPIRGDREINEAEANIVRRIFREFAAGVGPRTIARTLNEEGVPGPAGKLWSDTTIRGHVKRGTGLVNNELYIGRLIWNRLRYIKDPSTGKRVSRLNPESDWIIKDVPELRIVDDELWHSVRVRQGEIAEKFANVTEAVRKHHKKNRLNGTRRPKSLLSGLVFCGCCGGPYSLRGADRFACSNHISKGACSNSRTIPRECLEARVLSGLKDRMMAPEIVEEAMRAYAEETNRLNRERRSSGDSWKAELVKIEKQIRGIIEAIKAGMFHESMKAEMDTLEARKTELNTLLADAPEDTPDILPSASAIYAKKVSALTKALNRKEER

SEQ ID NO: 3412 - protein, 485 aa, Artificial Sequence
  Description of Artificial Sequence: Synthetic polypeptide
MKLKPIIGYARVSTEEQANTHALEQQISRLINTGVQKVYFDIESGREQDRDQFKKVLELVIRQEISELRAIRWDRLARNAYLYLEVKKIFKISGVKLILLDQGEVDFNTASGELHSDLQVLFSVHESRMLQERVNRGLDYRRSRNAAWMQPPWSYLIVNEKYELDHTPLPYCFLIHKPDNAAELSHEPDDSPKLVRISRAKIAREVFEYFLLVRKPTKVLKHLHEVYGLQKNSEDNLPEFKNFPISIWGLKYWLQNPVFQGHTAYHKLKSNGSLKSPDDWDIRRDTHPEQRLINEEEAQEIKAIFASNTKRFGQVDAKFYLTGHIFCEKCRAKCNLKQNRDYAYYGCPHSATVCDNRPNVRLFKIEQAIIAQLVLRSKQVSESPSNTTKSERLVELERQYFELDQIAGSDFNPALKEAKEKLLKAIEAEPTPTQDIAQQILRHPMAKKINFWYTLTQTEREIFYDLLLARVVIGKGEVTSVLLKV

SEQ ID NO: 3413 - protein, 484 aa, Artificial Sequence
  Description of Artificial Sequence: Synthetic polypeptide
MKTVAYYRSSIDSQENSIEMQQNSVLTRSIDMALIIDEEYIDEAVSARKIGLKKRSALQKLLQDIKNNNVETLFVFKRDRLARNVMEYYEIYQILRNKKINVILTAPNEPPVYYTPIGEYLELIMAGMAQREGEQIIERLKQTLKSNFQSGKNPGRLPYGFKWNKETKEIELIDEQVQIVKRIYQELVSGKYESLKELCSVLGLKENGKFWTSADIRKIALNPTYIGLRTMNIFGEDVTSKYERLSIIDKNTWEKACSIVTVLSPKKTHQDYVFEQVLFPLQDLLICSKCNESLQKVKARRKDNLKYKCLNHSSVYVFKSTIEPLVFERCKEYFHSLLTSHFYELFDRYEQDAKKQVKQKIQTIEEKIKLMNEKLITKVDTWYHETDAPYKEQKEIEIMALYDELAKYKKQKERVIQELSDVKQLREKISNYQSSISLSYDDIKENRQLGSFFQDLIQQVKTDGKNCEIVFKHPFLRTQEVLTS

SEQ ID NO: 3414 - protein, 479 aa, Artificial Sequence
  Description of Artificial Sequence: Synthetic polypeptide
MAKAKTPGQRVGVGSAAIYARISADVEGTGLGVARQVQDCRKLAADRGWQVGDEYVDNDVSAYSGKPRREYARMLDDLKSGARDAVIVYNLDRLHRRPVELEEFVALCESVGVRDVATVTADIDLGNDDGLFMARIFAAFAAKESGRKSARIRRKMLQNAEQGLPHGSARPFGYEPDKITVCSKEAKVIREMVARYLAGASIRSLTIWLNDAGLAPAVAKSWQTTAVRQILASGRIAGLREHHGEVIGPAAWPAIITHAERDRILARMTARSVTKTRAPRTYLLSGLLRCGRCGNRLFSQARHNNPQNRVRRYVCLKGPDHGGCGRLTVVALPVEELLTDAVLTRLDSPHLANVLAGKASVDADVAALSAQLEADTTRLDELAALYAQGAVTAREWIAARDPITDRITATRRDIAAATDTTNVTELAGTGHLLRGQWDDLDIDRQQTIIKAVLDHAVIAAGTPGARSLDINRVRPHWGV

SEQ ID NO: 3415 - protein, 477 aa, Artificial Sequence
  Description of Artificial Sequence: Synthetic polypeptide
MSDQRIGYVRVSSVDQNTDRQLDGIPLSRVFTDKASGADTKRPELDRLLAFVREGDTVVVHSLDRLARNLDDLRRLVQRMTLQGVRIEFVKESLTFTGEDSPMANLMLSVMGAFAEFERALLRERQREGIGQAKLRGVYRGRKPSLTEKQIAAEYGDPHRQNRVDLSRHPLHTPTIQSPASPIAVGSISQYAVPQRPQRTPSLSSTRSRTSLIVLFSIRTSPCCSFRIRIRRNRRRGRSPREEIFRRKILGRSWPESPGPLPFSDCGRYAPLSSRFRTSRNRQGPPSLPSSGNPRSSPETRREPPEHLFWKGGKSRKRIPPIRSCSLKLLRVGIMDGAGPSKCRIPKTEKHGPQFTQVGLFPAIPTEKRKPSPGGSCEGQSPDMGQGFPAPVRKIGGVRSTNVFVFVLPSLVSPCEKIFKPIKTGREEARERSDPCSSSFALRAPVPAPFFPGKKMKNSVRLPPPLLFFEGGSYLTL

SEQ ID NO: 3416 - protein, 476 aa, Artificial Sequence
  Description of Artificial Sequence: Synthetic polypeptide
MTETRCALYARVSSEAQTRDNTIASQVVALQERIAADGFLLEPDHSYVDDGYSGSLLLRPALERLRDAVAGGQVDRLYVHAPDRLARRYAHQALLIDEFRRAGVEIVFLNRPIGGTAEDDLLLQVQGVIAEYERAKILERSRRGRRHAACSGSVSALTGAPFGYRYVSRDQGGGLARFEVVEAEAHIVRLIFAWVGLDRMSLREVCRRLEQIGCRTRTGTTPCYASTIRGILANPAYVGRAAFGRARYLPPRPRLRPIRGHLQPSPHATSRVAVPPEEWIEIPVSSLVDPAVFEAVHAQFEENRKRKRQRTPSSDWLLQGLTVCRRCGYAYYGKRAPRVHKYDPTDTLRYYRCIGTDGHRFSGHRVCDNPQVRGDHLEEAVWDQVKGLLEDPHRVAGEYRRRLLAARDQVREPEEIVRLERQMATLRRGIGRLIDSYAEGIIDKAEFEPRIAGLKQRFSQLQERHQAAVEVAECEL

SEQ ID NO: 3417 - protein, 472 aa, Artificial Sequence
  Description of Artificial Sequence: Synthetic polypeptide
MTSTIVRVVIYCRISKDRIGAHLGVDRQEFECREMARKRGWTVVAVFADNDLSAYSGKPRPGYRRLLALIEAGEADAVLCWHTDRLHRHGDPMELENYIDLCQPRNIPTYAKQAGTLDLTTAWGRKDARNRAVDARYESEHASERLVEKMTELARDGLFLGGPRPFGFDSDGLTPRPAEIAAIARAIQDVLAGASIGSVARAWNELGLKPPQGAKEWIPASVRSVLMRPRNAGLSVHRRQVVGNATWAPIVSEAQWRALKSMLDDPERRPKGNLSLKWQGSNGYYCGKCDGKATMRSNSVWSPKRKILQPAYRCRAVNHNTIIAEPVDDLVNAVIADLLRRENVSLLPSADPDELRSAQAELTALGNRKKQLAALYGANEIDEQEWSEARASLTGALERAQAKVAELSAGSTLAGIADAPDPGRAFLASTVERRRAVITAVAVVSIMPNNPKGYTREAGKIDPNRVDITPIG

SEQ ID NO: 3418 - protein, 467 aa, Artificial Sequence
  Description of Artificial Sequence: Synthetic polypeptide
MKCVIYRRVSTDMQVEEGISLDMQKLRLEQYAKSQDWLVVNDYCDEGYSAKNTERPAFQQMIRDMKKKQFDIILVYRLDRFTRSVSDLHSILKIMDEYNVKFKSSTEIFDTTTATGRMFITLVATLAQWERETTAERVRDSMHKKAELGLRNGAKAPMGYNLKKGNLYINHTEAEIVKYIFEMYKTKGVVSIVKSLNSRGVKTKQGKIFNYDAVRYIINNPIYIGKIRWGEDILTDIAQEDFETFINKDTWYTVQQIQDSRKVGKVRLQNFFVFSNVLKCARCGKHFLGNRQVRSHNRIAVGYRCSSRHHQGICDMPQVPENILEKEFLNLLEDAVVELDASDEKPVELSNLQEQYNRIQDKKARLKFLFIEGDIPKKEYKKDMLTLNQEENIIQKQLANITDTVSSIEIKELLNQLKDEWNNLNNESKKAAVNAIISSITVDIIKPARAGKNPIPPVIKVMDFKLK

SEQ ID NO: 3419 - protein, 463 aa, Artificial Sequence
  Description of Artificial Sequence: Synthetic polypeptide
MKVAIYARVSTDEQAKEGFSIPAQRERLRAFCASQGWEIVQEYIEEGWSAKDLERPQMKQLLKDIKKGNIDIVLVYRLDRLTRSVLDLYLLLQTFEKYNVAFRSATEVYDTSTAMGRLFITLVAALAQWERENLAERVRFGIEQMIDEGKKPGGHSPYGYKFDKDFNCTIIEDEANVVRMIYRMYCDGYGYRSIADRLNELGIKPRIAKEWNHNSIRDILTNDIYIGTYRWGNKVVLNNHPPIVSEALFRKVQKEKNNRSVDRKRVGKFILTGLLHCGNCNGHKMQGSFDKREQKTYYRCLKCNRITHEKNILESLLAEVQQLITSKEYFMSKFSHQFDEPKTIDASALTKELEKIKRQKEKWYDLYMDDNNPIPKEELFAKINELNEKEKEIYETLSECELEEKESIEEKYNRISKMTDFKQQFEQADDFTKKELLFSIFEKIVMYREKGRGKKISLDYTLK

SEQ ID NO: 3420 - protein, 463 aa, Artificial Sequence
  Description of Artificial Sequence: Synthetic polypeptide
MRVAIYVRVSTDEQAKEGFSIPAQRERLRAFCESQGWEIVQEYIEEGWSAKDLNRPQMQRLLKDIKKGNIDIVLVYRLDRLTRSVLDLYLLLQTFEKYNVAFRSATEVYDTSTAMGRLFITLVAALAQWERENLAERVKFGIEQMIDEGKKPGGHSPYGYKFDKDFNCTIIEDEANVVRMIYRMYCDGYGYRSIADRLNELGIKPRIAKEWNHNSVRDILTNDIYIGTYRWGNKVVLNNHPPIISKSLFRKAQKEREKRKVDRTRVGKFLLTGLLYCGNCDGHKMQGSFDKREQKTYYRCLKCNRITNEKNILEPLLDEIQLLITSKEYFMSKFSDQYDQQEAFDVSTLTRELEKIKRQKEKWYDLYMDDHNPIPKEELFSKINELNKKEEEIYSQLNEVEPEENEPIEEKYNRLSKMLDFKKQFEQANFFTKKELLLSIFEKIVIYREKGKFKKITLDYTLK

SEQ ID NO: 3421 - protein, 463 aa, Artificial Sequence
  Description of Artificial Sequence: Synthetic polypeptide
MTSANAIIYARISKDRTGAGLGVERQAEDCRALAERLGWTVLRVESDNDISAYSGKRRPGYERTLAALESGEASAVIAWHSDRLHRRNTELEPFLDIVERTGAQVATVQSGPVDLASPSGRMTARILGAVAQQEVEHTTARIKAQKAQTAAAGGYRGGMRPFGYERDGMTIREHEAAIIRRAIADVTAGKTISAVRRELNAAEIRTSSGREWSLPGVRNVLTRWRNAGKVEREGEPVADAQWPAIVTVDELLAVRAVLANPARRVSPGNQRRWQGAGVYIDAYTGDPMVCTKSSGTNPTPVYRPAARTAGCASVVAVDLDEYVSAAVCARLGQPDARELLAAPEVDTRGLSGQREALDARLREAASLFSSGAITGAQLTEITADLRAQLDTIDAQLDAATADPELAELLRADDIRAAWDGPNGLHVDTRARLIKSLARVTVHKMTVKGVKRTFKPECVDIEWL

SEQ ID NO: 3422 - protein, 456 aa, Artificial Sequence
  Description of Artificial Sequence: Synthetic polypeptide
MEAAVYLRQSVDKYGDELAITRQREDCLKLCGARAWIPHEYVDNDRSATKGPRPAYEQMLDDIRTGVIGAVVVWDLDRLHRRPMELEHFIDLADDKHLALASVGGDADLSTDNGRLFARIKGAVSRAEIERKSARQKRAARQRAEAGIWWIGPRPFGYTEAGEVVDTEAGALREAYSAILASASLYSIAAQWNSAGIKTTRGNAWTGRSVKQTLVRPRYAGFRFYRDEILGKADWPAIVPEALWRAVRDILADPSRRAPWTGRKYLLTGLARCGKCGATVTTTTKAQVGRVVYVCKHCYGISRKQAEVDNWVIWRVANALAQPDAWRALLGGTSEDAALLREEQAALRSRLDMLATDFADGVLTRDQLRTATERIRRRLADVESQMFGPDAHRYFGDVIDADDPRVAFRELPLDRKRALIETMATVTIMPIGHGGTKVFDPLMVEILPRNGFVCRP

SEQ ID NO: 3423 - protein, 453 aa, Artificial Sequence
  Description of Artificial Sequence: Synthetic polypeptide
MNSESHQKITSAHLSRMAYLYVRQSTLRQVLENTESTQRQYALRERAAALGWPLEHIVVIDRDLGQSGASAADREGFQQLVSEVSLGHVGIVLGLEVSRLARNSTDWHRLLELCAFADTLILDEDGLYNPGLFNDRLLLGLKGTMSEAELHVLKARLRGGILSRARRGELKQMLPVGFVHDVQDRVILDPDVQVQGAVRLFFETFKRTGSCLAVVKDFHARGLLFPRRLRSGAHKGELVWAELLHCRARQIIHNPRYAGAFVFGRTKQRHLPNGKICSRLVPSEEWILLRDMHPGYISWEEYQSNRQQVQGNALSWSDDRRRSPAREGNALLQGLVICGTCGERMTVRYHLHRGQSVPTYWCGRRPMHRGESGLCQTVHGGTLDTAIGDVVIEAMTPFAIEVALTVQEELVSRHEEADRLRRQHVERARYEADLAQRRFPEGGPGQPVGRRCA

SEQ ID NO: 3424 - protein, 452 aa, Artificial Sequence
  Description of Artificial Sequence: Synthetic polypeptide
MSKHVIPKRRCAVYTRKSHEEGLDQDYNSIDAQKDAGHAYITAHRSEGWISVNDNYDDPAYSGGTLERPALKRLMRDIEEDKIDTVVVYKIDRLTRSLHDFSQLVEIFERMNVSFVSVTQEFNTTSSMGRLMLNILLSFAQFEREVTAERIRDKVASSKRKGLWMGGIPPLGYDVKDRLLVVNSNEAKTVRHIFSRFLEIGSATLLVKELRLDGISTKSWTTKDNKYRPGKLIDKGFIYKLFQNRTYLGEIGHKGQWYEGKHDAIIDKTLWEAVHKKLADSYKAKGNNTRAKVPFLLKGLLFDTEGRALTTSFANSRHKNGKRYRYYLSIRDAKEGAGTSDLTRFPASELETAVTTQVMTLLKSSEIVKEVTTIAQVHDDELDEAMVAVALTKMTTLWEQLFPDEQARLIHLMIEKIIITPNAMDLRLRKNGLEQLAQEITPETLKKKVVNG

SEQ ID NO: 3425 - protein, 442 aa, Artificial Sequence
  Description of Artificial Sequence: Synthetic polypeptide
MTRIIRKITPKAPKAPIKKRVAAYARVSSGKDAMLQSLSAQISYYSEFIQKRYDWEYAGVYADEAATGTKDNRKEFQRLLSDCRSGKIDMVITKSISRFARNTLTVLETVRELKGISVDVYFEKENIHSISGDGELMLTILSSFAQAESLSVSENCKWRIRKRFAEGELVNLRFMYGYRIEKGRVEVNQKQAKIVRMIFNDYISGLGCTAIANKLRRMGIQSLRGGIWNSDIVAQIIKNEKYIGNALLQKKHVSNHLTKKLIANKGVLPKYYAEGTHPPIIDAATFQLAREIMAKNWILNEGKKAAGTYPFTSKIKCGKCGKNYKRKTTHGQAFWNCSTHIKYGKEVCHTKRIPESILCLVAANALGIEEFDEVTFNRQIEEIQIPDANLLLFVFNDGRTDLREWQSKSRSESWNEEAREKARMRQIEYLEGRKGECVRHVQ

SEQ ID NO: 3426 - protein, 437 aa, Artificial Sequence
  Description of Artificial Sequence: Synthetic polypeptide
MKEKKITKIEALSKLPKKTRVAAYARVSNGKDAMLHSLSAQINYYKKMIQDNNDWQFVGVYADEALTGTKDSRQEFQQLLEDSKAGKIDMIITKSISRFARNTMTLLETVRELDKLNVDVFFEEQNIHSISSEGEMVLTLLASVAQEESRSVSENMKWRIKKEFEQGEIWGGRSPLGYSLKNKTFRVIPKEAEVVQLIYKLYVDGNGAEAICQILDAKGIKPKESKKWGPTSIIKILSNRNYTGDLLLQKTYLNNHLSKKQVINKGELDRYLVKGNHEAIISNELFDKVQKLKHQRAIKNKSNLPKKKTFLHGLIQCGICGSTYTPKKMRKKDIWICSKSASKGQDVCDSKLVPHNIIVEASNHILEMDQNNEDTFKSKVTKIIVQENRMLEFHMKDGKILNYRWKHKSRSKSWTPEMKEQARLRALEQHHGGGENA

SEQ ID NO: 3427 - protein, 435 aa, Artificial Sequence
  Description of Artificial Sequence: Synthetic polypeptide
MTGTAELVIFVTDATGFAMQVYGYKHEKVLTKLLNEALFHYMRNPGWIKVIVKKHRYYACQLVTIPLLAYIKKRVPDKRLQVEAERVMANIAVNYEEKVPETWIMVNENFFTPIPSPEENKFLSQKLNNSLSKMDFIEPEQEKEALGKKKSVKPVKVKSPATSKRKGSPDADKVIERVQLGWRVRDICEEQGCSEAYVYKLIKKRNGCSAMDYRWKQWELISFMYHAEPKVTLEEIEKTCGVTRAAIYHALRKVAERDGKKNEYRERPKKLSAEDVENIKQKLENGALRKEICKEYGITRETLIRYIGRRENYRVIPEELKEAAIRLRIQGKTLQQTADILSVNLHWVKKVWREKKHSPTVIEKRLKYDNRNALTKRDREQAVNAVLKGGHTRNQIYTQYGINALTLRRYIRAAQKREAEALSRKAEDSDKNDDS

SEQ ID NO: 3428 - protein, 432 aa, Artificial Sequence
  Description of Artificial Sequence: Synthetic polypeptide
MLIGYGRVSTADQNPAHQIDALRRAGVEPGDIHIDTASGAKASRPKLDLVLTLARRGDTIVITRLDRLGRSMLHLVNLGADLRARGIGLKVLEQGIDTDTAEGRAMFGMLSVLAEFQRELIVANTRDGLEAARARGRTGGRRPKLTVHQIEQAQRLYDEGRHTVQQIADILGVKRGTLYGHLDKNSIGTRPHSGPATPLPTTSAPAAVVVDQADPAPGIAPAITETATATPQTLGVPAGDPTDGRPGSPGGSSAVVTEAAPTGLVDLGGLVPEPDPIRPLPAADADEHAETNSSTREFARERPNLAWRLKQTARMNLPEPPAVCPNDACGYTAHETSERGRLLEDIKVVWLEPADDGGLIEARHCHRCRPREVPIADIECAACDCGGPLLTGVYATELRDTGEIPALVRRWLSVRRWRVTDAGPVCPDHPDS

SEQ ID NO: 3429 - protein, 416 aa, Artificial Sequence
  Description of Artificial Sequence: Synthetic polypeptide
MAQVSVVTPVRPPTPKLVNVAAYTRVSTNAVEQLASLSAQVSYYSRLIQSTPGWAYAGVFTDEGVTGTSMKSRQGLADLMNTARAGKIDLVLCKSISRLARNTVDLLATVRELKDLGVAVRFERERIDTLSADGELLLTLLASFAQEESRSLSQNVKWAIRNRYKNGGTNSFVVYGYSWADGQFTIIEDEAKIVRLLFANYLDGISPEKTAAILNGQGARSRGGGRFYGSVFRRMLENERYKGCQMLQKMYRPTIQAPTCALNDGELPRYWVEQALPPIIDEEMFDAVQAEIAHRREIGPAATPSKNTGVFTGRICCGACGKNYQRKTRTYKSGTSYKFWRCWSACTGNGNPCRGHNLRETLLEQACADMLGTQSFDPVQVGEQIVMIEAFPHQLTFHLADGTMTPVGLTSEGRLA

SEQ ID NO: 3430 - protein, 408 aa, Artificial Sequence
  Description of Artificial Sequence: Synthetic polypeptide
MFVPLLGYARVSTSDQSLTGQIDALRAAGCERVWTDVASGARARRPGLDELVAAVVAGDTVVVTRLDRLGRSLPHLLGLVENLAAAGVGLRSLAEEIDTSSATGRLVLHVFGALAEFERGINHERTMGGLAAARARGRIGGRPPALRGRRLAHARELAAAGMPVAEIADTLLVGRSTVYRALNGSREQDGEEMTSSPIDRVWSVRDAVLKWLYLKAMVDGNRHPVLKADDIANAVEWQGDSLTQQEVAEASEWLRDQEYISGTASWGHGVVRPSITAKGEALADAGKSVRGGNAPADPQGATTIHISNSANVAIGSPGATQTYTVAEQIKRALAVADALEAAADGPPEAVEHAHQIAVEIKREAAEPQPNPSRLKQLLLYAITAGVGALGQTAATDLVHLASQALQTF

SEQ ID NO: 3431 - protein, 402 aa, Artificial Sequence
  Description of Artificial Sequence: Synthetic polypeptide
MTRYGTLLGLHGQPTDRVIIVRTGPKTTRVKFPWPDKPGFNPDEVRVGTDTVLDDGGVLWEKYQRTPHAATWLSYSGDPQGLLHVHRVYKNVIKASLYEGNGSWSRVEDFHPDAVRFDAGEGWPKARTDELVTNTSHQPASVATPTTPAPPVKKGPVFHAPTTDPTPAPQPAARSPQQSSVATPPTPTSKPHKTNPIKAIQTAQTPAPPAPKATASGQRVGYLRVSSTDQNLARQREALGVLDREFVDELSARSRAHRPALEECMAYLRTGDELVVASIDRLARSLVDLRTIIDQVTAKGASVRFLKEGLVFSATDQDPRATLMLGILGSFAEFERSIIRERQAEGIALAKKAGKYTGRKRALSPEQVEHARMRVEAGETKTAIAQGLGVGRATLYRALSVD

SEQ ID NO: 3432 - protein, 30 aa, Unknown
  Description of Unknown: nuclear localization sequence
MDSLLMNRRKFLYQFKNVRWAKGRRETYLC

SEQ ID NO: 3433 - protein, 28 aa, Unknown
  Description of Unknown: nuclear localization sequence
PKKRKVEGADKRTADGSEFESPKKKRKV

SEQ ID NO: 3434 - protein, 40 aa, Unknown
  Description of Unknown: nuclear localization sequence
RKSGKIAAIWKRPRKPKKKRKVKRTADGSEFESPKKKRKV

SEQ ID NO: 3435 - protein, 17 aa, Unknown
  Description of Unknown: nuclear localization sequence
KKTELQTTNAENKTKKL

SEQ ID NO: 3436 - protein, 19 aa, Unknown
  Description of Unknown: nuclear localization sequence
KRGINDRNFWRGENGRKTR

SEQ ID NO: 3437 - protein, 16 aa, Unknown
  Description of Unknown: nuclear localization sequence
KRPAATKKAGQAKKKK

SEQ ID NO: 3438 - protein, 29 aa, Unknown
  Description of Unknown: nuclear localization sequence
PKKKRKVEGADKRTADGSEFESPKKKRKV

SEQ ID NO: 3439 - protein, 16 aa, Unknown
  Description of Unknown: nuclear localization sequence
SGSETPGTSESATPES

SEQ ID NO: 3440 - protein, 4 aa, Artificial Sequence
  Description of Artificial Sequence: Synthetic peptide
SGGS

SEQ ID NO: 3441 - protein, 4 aa, Artificial Sequence
  Description of Artificial Sequence: Synthetic peptide
GGGS

SEQ ID NO: 3442 - protein, 5 aa, Artificial Sequence
  Description of Artificial Sequence: Synthetic peptide
GGGGS

SEQ ID NO: 3443 - protein, 5 aa, Artificial Sequence
  Description of Artificial Sequence: Synthetic peptide
EAAAK

SEQ ID NO: 3444 - DNA, 76 bp, Artificial Sequence
  Description of Artificial Sequence: Synthetic oligonucleotide
gttttagagctagaaatagcaagttaaaataaggctagtccgttatcaacttgaaaaagtgggaccgagtcggtcc

SEQ ID NO: 3445 - DNA, 306 bp, Artificial Sequence
  Description of Artificial Sequence: Synthetic polynucleotide
tgcctgtcatacgaaaccgagatactgacagtagaatatggccttctgccaatcgggaagattgtggagaaacggatagaatgcacagtttactctgtcgataacaatggtaacatttatactcagccagttgcccagtggcacgaccggggagagcaggaagtattcgaatactgtctggaggatggaagtctcattagggccactaaggaccacaaatttatgacagtcgatggccagatgctgcctatagacgaaatctttgagcgagagttggacctcatgcgagttgacaaccttcctaat

SEQ ID NO: 3446 - protein, 102 aa, Artificial Sequence
  Description of Artificial Sequence: Synthetic polypeptide
CLSYETEILTVEYGLLPIGKIVEKRIECTVYSVDNNGNIYTQPVAQWHDRGEQEVFEYCLEDGSLIRATKDHKFMTVDGQMLPIDEIFERELDLMRVDNLPN

SEQ ID NO: 3447 - DNA, 108 bp, Artificial Sequence
  Description of Artificial Sequence: Synthetic polynucleotide
atgatcaagatagctacaaggaagtatcttggcaaacaaaacgtttatgatattggagtcgaaagagatcacaactttgctctgaagaacggattcatagcttctaat

SEQ ID NO: 3448 - protein, 36 aa, Artificial Sequence
  Description of Artificial Sequence: Synthetic polypeptide
MIKIATRKYLGKQNVYDIGVERDHNFALKNGFIASN

SEQ ID NO: 3449 - DNA, 303 bp, Artificial Sequence
  Description of Artificial Sequence: Synthetic polynucleotide
tgcctgtcttatgataccgagatacttaccgttgaatatggcttcttgcctattggaaagattgtcgaagagagaattgaatgcacagtatatactgtagacaagaatggtttcgtttacacacagcccattgctcaatggcacaatcgcggcgaacaagaagtatttgagtactgtctcgaggatggaagcatcatacgagcaactaaagatcataaattcatgaccactgacgggcagatgttgccaatagatgagatattcgagcggggcttggatctcaaacaagtggatggattgcca

SEQ ID NO: 3450 - protein, 101 aa, Artificial Sequence
  Description of Artificial Sequence: Synthetic polypeptide
CLSYDTEILTVEYGFLPIGKIVEERIECTVYTVDKNGFVYTQPIAQWHNRGEQEVFEYCLEDGSIIRATKDHKFMTTDGQMLPIDEIFERGLDLKQVDGLP

SEQ ID NO: 3451 - DNA, 159 bp, Artificial Sequence
  Description of Artificial Sequence: Synthetic polynucleotide
atgaagaggactgccgatggatcagagtttgaatctcccaagaagaagaggaaagtaaagataatatctcgaaaaagtcttggtacccaaaatgtctatgatattggagtggagaaagatcacaacttccttctcaagaacggtctcgtagccagcaac

SEQ ID NO: 3452 - protein, 53 aa, Artificial Sequence
  Description of Artificial Sequence: Synthetic polypeptide
MKRTADGSEFESPKKKRKVKIISRKSLGTQNVYDIGVEKDHNFLLKNGLVASN

SEQ ID NO: 3453 - DNA, 250 bp, Homo sapiens
ccggtcccccccgccgggtccgcccccggggccgcggttccgcgcggcgcctcgcctcggccggcgcctagcagccgacttagaactggtgcggaccaggggaatccgactgtttaattaaaacaaagcatcgcgaaggcccgcggcgggtgttgacgcgatgtgatttctgcccagtgctctgaatgtcaaagtgaagaaattcaatgaagcgcgggtaaacggcgggagtaactatgactctcttaag

SEQ ID NO: 3454 - DNA, 250 bp, Homo sapiens
gcggttccgcgcggcgcctcgcctcggccggcgcctagcagccgacttagaactggtgcggaccaggggaatccgactgtttaattaaaacaaagcatcgcgaaggcccgcggcgggtgttgacgcgatgtgatttctgcccagtgctctgaatgtcaaagtgaagaaattcaatgaagcgcgggtaaacggcgggagtaactatgactctcttaaggtagccaaatgcctcgtcatctaattagtgacg

SEQ ID NO: 3455 - DNA, 250 bp, Homo sapiens
tcccccccgccgggtccgcccccggggccgcggttccgcgcggcgcctcgcctcggccggcgcctagcagccgacttagaactggtgcggaccaggggaatccgactgtttaattaaaacaaagcatcgcgaaggcccgcggcgggtgttgacgcgatgtgatttctgcccagtgctctgaatgtcaaagtgaagaaattcaatgaagcgcgggtaaacggcgggagtaactatgactctcttaaggtag

SEQ ID NO: 3456 - DNA, 250 bp, Homo sapiens
cggcgcgctcgccggccgaggtgggatcccgaggcctctccagtccgccgagggcgcaccaccggcccgtctcgcccgccgcgccggggaggtggagcacgagcgcacgtgttaggacccgaaagatggtgaactatgcctgggcagggcgaagccagaggaaactctggtggaggtccgtagcggtcctgacgtgcaaatcggtcgtccgacctgggtataggggcgaaagactaatcgaaccatctag

SEQ ID NO: 3457 - DNA, 250 bp, Homo sapiens
gcattcgtattgcgccgctagaggtgaaattcttggaccggcgcaagacggaccagagcgaaagcatttgccaagaatgttttcattaatcaagaacgaaagtcggaggttcgaagacgatcagataccgtcgtagttccgaccataaacgatgccgaccggcgatgcggcggcgttattcccatgacccgccgggcagcttccgggaaaccaaagtctttgggttccggggggagtatggttgcaaagc

SEQ ID NO: 3458 - DNA, 250 bp, Homo sapiens
tagcagccgacttagaactggtgcggaccaggggaatccgactgtttaattaaaacaaagcatcgcgaaggcccgcggcgggtgttgacgcgatgtgatttctgcccagtgctctgaatgtcaaagtgaagaaattcaatgaagcgcgggtaaacggcgggagtaactatgactctcttaaggtagccaaatgcctcgtcatctaattagtgacgcgcatgaatggatgaacgagattcccactgtccct

SEQ ID NO: 3459 - DNA, 250 bp, Homo sapiens
ccccccgccgggtccgcccccggggccgcggttccgcgcggcgcctcgcctcggccggcgcctagcagccgacttagaactggtgcggaccaggggaatccgactgtttaattaaaacaaagcatcgcgaaggcccgcggcgggtgttgacgcgatgtgatttctgcccagtgctctgaatgtcaaagtgaagaaattcaatgaagcgcgggtaaacggcgggagtaactatgactctcttaaggtagcc

SEQ ID NO: 3460 - DNA, 250 bp, Homo sapiens
gcgcaagacggaccagagcgaaagcatttgccaagaatgttttcattaatcaagaacgaaagtcggaggttcgaagacgatcagataccgtcgtagttccgaccataaacgatgccgaccggcgatgcggcggcgttattcccatgacccgccgggcagcttccgggaaaccaaagtctttgggttccggggggagtatggttgcaaagctgaaacttaaaggaattgacggaagggcaccaccaggagt

SEQ ID NO: 3461 - DNA, 250 bp, Homo sapiens
ggccgggcgcgacccgctccggggacagtgccaggtggggagtttgactggggcggtacacctgtcaaacggtaacgcaggtgtcctaaggcgagctcagggaggacagaaacctcccgtggagcagaagggcaaaagctcgcttgatcttgattttcagtacgaatacagaccgtgaaagcggggcctcacgatccttctgaccttttgggttttaagcaggaggtgtcagaaaagttaccacagggat

SEQ ID NO: 3462 - DNA, 19 bp, Homo sapiens
gtctacggccataccaccc

SEQ ID NO: 3463 - DNA, 38 bp, Homo sapiens
atcgcttctcggccttttggctaagatcaagtgtagta

SEQ ID NO: 3464 - DNA, 250 bp, Homo sapiens
gtagccaaatgcctcgtcatctaattagtgacgcgcatgaatggatgaacgagattcccactgtccctacctactatccagcgaaaccacagccaagggaacgggcttggcggaatcagcggggaaagaagaccctgttgagcttgactctagtctggcacggtgaagagacatgagaggtgtagaataagtgggaggcccccggcgcccccccggtgtccccgcgaggggcccggggcggggtccgccg

SEQ ID NO: 3465 - DNA, 250 bp, Homo sapiens
cgcatgaatggatgaacgagattcccactgtccctacctactatccagcgaaaccacagccaagggaacgggcttggcggaatcagcggggaaagaagaccctgttgagcttgactctagtctggcacggtgaagagacatgagaggtgtagaataagtgggaggcccccggcgcccccccggtgtccccgcgaggggcccggggcggggtccgccggccctgcgggccgccggtgaaataccactactc

SEQ ID NO: 3466 - DNA, 250 bp, Homo sapiens
ccaaatgcctcgtcatctaattagtgacgcgcatgaatggatgaacgagattcccactgtccctacctactatccagcgaaaccacagccaagggaacgggcttggcggaatcagcggggaaagaagaccctgttgagcttgactctagtctggcacggtgaagagacatgagaggtgtagaataagtgggaggcccccggcgcccccccggtgtccccgcgaggggcccggggcggggtccgccggccc

SEQ ID NO: 3467 - DNA, 250 bp, Homo sapiens
tagctggttccctccgaagtttccctcaggatagctggcgctctcgcagacccgacgcacccccgccacgcagttttatccggtaaagcgaatgattagaggtcttggggccgaaacgatctcaacctattctcaaactttaaatgggtaagaagcccggctcgctggcgtggagccgggcgtggaatgcgagtgcctagtgggccacttttggtaagcagaactggcgctgcgggatgaaccgaacgcc

SEQ ID NO: 3468 - DNA, 250 bp, Homo sapiens
tgaaacttaaaggaattgacggaagggcaccaccaggagtggagcctgcggcttaatttgactcaacacgggaaacctcacccggcccggacacggacaggattgacagattgatagctctttctcgattccgtgggtggtggtgcatggccgttcttagttggtggagcgatttgtctggttaattccgataacgaacgagactctggcatgctaactagttacgcgacccccgagcggtcggcgtccc

SEQ ID NO: 3469 - DNA, 250 bp, Homo sapiens
acctactatccagcgaaaccacagccaagggaacgggcttggcggaatcagcggggaaagaagaccctgttgagcttgactctagtctggcacggtgaagagacatgagaggtgtagaataagtgggaggcccccggcgcccccccggtgtccccgcgaggggcccggggcggggtccgccggccctgcgggccgccggtgaaataccactactctgatcgttttttcactgacccggtgaggcgggggg

SEQ ID NO: 3470 - DNA, 250 bp, Homo sapiens
aaatgcctcgtcatctaattagtgacgcgcatgaatggatgaacgagattcccactgtccctacctactatccagcgaaaccacagccaagggaacgggcttggcggaatcagcggggaaagaagaccctgttgagcttgactctagtctggcacggtgaagagacatgagaggtgtagaataagtgggaggcccccggcgcccccccggtgtccccgcgaggggcccggggcggggtccgccggccctg

SEQ ID NO: 3471 - DNA, 250 bp, Homo sapiens
ggagcctgcggcttaatttgactcaacacgggaaacctcacccggcccggacacggacaggattgacagattgatagctctttctcgattccgtgggtggtggtgcatggccgttcttagttggtggagcgatttgtctggttaattccgataacgaacgagactctggcatgctaactagttacgcgacccccgagcggtcggcgtcccccaacttcttagagggacaagtggcgttcagccacccgag

SEQ ID NO: 3472 - DNA, 250 bp, Homo sapiens
aactggcttgtggcggccaagcgttcatagcgacgtcgctttttgatccttcgatgtcggctcttcctatcattgtgaagcagaattcaccaagcgttggattgttcacccactaatagggaacgtgagctgggtttagaccgtcgtgagacaggttagttttaccctactgatgatgtgttgttgccatggtaatcctgctcagtacgagaggaaccgcaggttcagacatttggtgtatgtgcttggc

SEQ ID NO: 3473 - DNA, 102 bp, Homo sapiens
tgaacgcgcccgatctcgtctgatctcggaagctaagcagggtcgggcctggttagtacttggatgggagaccgcctgggaataccgggtgctgtaggcttt

SEQ ID NO: 3474 - DNA, 150 bp, Homo sapiens
tctgttcttatcagtttaatatctgatacgtcctctatccgaggacaatatattaaatggatttttggagcagggagatggaataggagcttgctccgtccactccacgcatcgacctggtattgcagtacctccaggaacggtgcaccc

SEQ ID NO: 3475 - RNA, 47 nt, Artificial Sequence
  Description of Artificial Sequence: Synthetic oligonucleotide
gggaaauaagagagaaaagaagaguaagaagaaauauaagagccacc

SEQ ID NO: 3476 - RNA, 110 nt, Artificial Sequence
  Description of Artificial Sequence: Synthetic polynucleotide
ugauaauaggcuggagccucgguggccaugcuucuugccccuugggccuccccccagccccuccuccccuuccugcacccguacccccguggucuuugaauaaagucuga

SEQ ID NO: 3477 - protein, 9 aa, Artificial Sequence
  Description of Artificial Sequence: Synthetic peptide
RRRRRRRRR

SEQ ID NO: 3478 - DNA, 260 bp, Artificial Sequence
  Description of Artificial Sequence: Synthetic polynucleotide
ataaaaattgaatgtctttctggcttagataaaggaaaggttattgagtttatttcttcaaagaatggaaatgagtttgaattagcagctggagaatacaaaatctcagaaactcaagctccagagggctatactttaataggacaaaaaaattaactgtcctaaattgaaaaaatacatacggaaaggaggataagaaaatgtcaaggacttcaagaattacagcactttacgagcgtttgtcaagagatgatgacctt

SEQ ID NO: 3479 - DNA, 260 bp, Artificial Sequence
  Description of Artificial Sequence: Synthetic polynucleotide
ggcaacccgaacgagagtcaaaatacatttgcgatgtgccggcgcatcgcctgattttacgcacttccgaacccgtcatggcgaagaaaccgaaagccaaggtctacagctatctacgcttctccgatccgaagcaggccgctggcagcagtgcggatcggcaaatggaatacgcggcgcgatgggcgaccgagcacgacatgcagctcgacgctacgctgacgttacgcgacgaaggactgtctgcattccaccagcgc

SEQ ID NO: 3480 - DNA, 260 bp, Artificial Sequence
  Description of Artificial Sequence: Synthetic polynucleotide
ccggtcggcaagagcggcaggatattcaatcccgaacgggtgcaggtgaattggcgatgagccggcaccacaacatcgtgatcgtctgtgaccacggccgcaaaggcgatggccgcatcgaacacgagcgctgcgatcttgtcgcgccgatcatttgggtcgacgagacccagggctggttaccgcaggcgccagcggtggcaacattactcgacgacgacaaccagccgcgagccgttattggcttgccgcccaacgag

SEQ ID NO: 3481 - DNA, 260 bp, Artificial Sequence
  Description of Artificial Sequence: Synthetic polynucleotide
ttttgcatattcattgaaacgtttaataacactatagtttaatttaaaatctcctcatttggacaaacagctgttacatagcattacccaaggggtgatgcattttatgaaagtgataatcatcgagggaccgcaagctgacaaatgcattaacgattgctatcattatttaataaaactttataggaaggagattcagggtgatagcaatatatgtaagggtatcgaccgaggaacaagcgatcaagggatcgagcatc

SEQ ID NO: 3482 - DNA, 260 bp, Artificial Sequence
  Description of Artificial Sequence: Synthetic polynucleotide
ggaaccccgccctcgaccccgacatccccctcggcgatgccgtcgacgccatcgagaccgtcatcgtgccgcgcgcccgcgatctcggcggtttcgaggtgcgccgcgcgctgccctcggcccggaggcagatggtgggccccttcatcttcttgaacatgattggtattgtgaccccatcagagacgatgaggccgagccatgaccaatccagcaagccgaccgaaggcatacagctacattcgtatgtcctcggctat

SEQ ID NO: 3483 - DNA, 161 bp, Artificial Sequence
  Description of Artificial Sequence: Synthetic polynucleotide
aggctggaccacccacaacaacacccacggccacaccgaatggctaccaccaccccacctcgaccacggccaaccgtggacctgtgagatacactacacctgtgcgtgctgctgtctacctccgaatctcagaagaccgctccggcgaacagctcggcgtg

SEQ ID NO: 3484 - DNA, 260 bp, Artificial Sequence
  Description of Artificial Sequence: Synthetic polynucleotide
tccgtgcggccgccccgagagcgcttcgccacccgtttcggccgttctggcgcttcgccgcccgcgcggccgctccgagggcgttgcgtcacccgtgcggccgtcccgattctgcgccgcgtactatggacggcgcagaaggggagtagctcttcgcccgagaacttctgcaaggcactgctcttggctatggtctcggcatgcccatcgcgcctgagttcctgagcctcgcctacccaggtcaggagttccccgcctac

SEQ ID NO: 3485 - DNA, 91 bp, Artificial Sequence
  Description of Artificial Sequence: Synthetic oligonucleotide
ctagtatttattttgaaaggagcaattttatatgaaacgtgcagcattgtatatacgtgtatccacaatggaacaagccaaggaaggatac

SEQ ID NO: 3486 - DNA, 260 bp, Artificial Sequence
  Description of Artificial Sequence: Synthetic polynucleotide
agttcttgatgctttaaataacagtatggataatcaaaaggaaaataaagtcacagttaatgatattacttatcaattttctacaattaacgctggaacaacaaatataacaactttagagattttcccaaactaaagagagcctccgggcttttcttttttaccgaaaaaaagaacgtatgtgcgaaaggagaatgagaatgaaagcggctatctatataagagtatctacacaagaacaagtagaaaattattcaata

SEQ ID NO: 3487 - DNA, 260 bp, Artificial Sequence
  Description of Artificial Sequence: Synthetic polynucleotide
ttcaactgttacagaattattacaaatagttggtatagtcctctttagcctttggagctattatctcatcatttgttttttaggtgaaaactgggtaaacttagtattaatcaatataaaattaattctcaaatacttaattacgtactgggattttctgaaaaaaagatcttaactttccatgcgagaggagaacggaaatgaaggcagctatttatatacgcgtatctactcaagaacaaatagagaattactctata

SEQ ID NO: 3488 - DNA, 260 bp, Artificial Sequence
  Description of Artificial Sequence: Synthetic polynucleotide
tgttcatcgtcataaatatcaaattcactactataattttcaactgattcttttatataagctatttctgcgtcagtaaactttacgcacatttcatcacctactttttattttattatatcacatttagtacctagtactaaatttcgggtagcccgcctacccttattatttttttgccaattttgaggagggagcacatgaaagtagcaatttatactagagtgagtacacttgaacaaaaagaaaaaggacactct

SEQ ID NO: 3489 - DNA, 260 bp, Artificial Sequence
  Description of Artificial Sequence: Synthetic polynucleotide
accattaactgaaaataaagatgtttataaagattaataacatctttaagcgtatcacataaaaaaacgttatcagcaactggcgaccaaaccgaaactgataacgcaaagattttaataagaaaacaacagagcaattaagaaattgcacacatttattataacatctttgctcttgttttaatactaggagtgagaaaatgaaagtagcagtctactgcagagtttcgactttagagcagaaagaacacggccactca

SEQ ID NO: 3490 - DNA, 75 bp, Artificial Sequence
  Description of Artificial Sequence: Synthetic oligonucleotide
ttgaggagggagcacatgaaagtagcaatttatactagagtaagtacacttgaacaaaaagaaaaaggacactct

SEQ ID NO: 3491 - DNA, 280 bp, Artificial Sequence
  Description of Artificial Sequence: Synthetic polynucleotide
tcggtgaatggacaaaaacccggtctattaaagacaaggcctaatttaatctaagatttcataacacatataccgaaatctaaaaactagatagatctatattcaaagaatacaaatctttcatattattttgttgttttcgtattcaatgttagatagaatgtttttacagatacttctgttttgacattaaacacaataaagaggtgctaaatttttggagttaaaaaatattgtcaattcttacaacatcacaaatattttaggttatcttagacgt

SEQ ID NO: 3492 - DNA, 260 bp, Artificial Sequence
  Description of Artificial Sequence: Synthetic polynucleotide
cagacgaaagaacgggtatccgatatgaacttatcggggactattactacccctgcttaaccgcagaagaaaaacctttgctttcaaggtacggaagaatgcgagagcgatatttgaaagaacacaagcgagttttatattacactctgatgacaagtggaaagttatatgaacaccttgccgagattgacacttcggcttgtgatatggctgaatatctcataaaggaaatggcaagaaagcaaggcgttaccgagcaa

SEQ ID NO: 3493 - DNA, 72 bp, Artificial Sequence
  Description of Artificial Sequence: Synthetic oligonucleotide
ggtaaagaacgtactcaaaaagtagaaatcaattataggtttctagcagtgtctcattgatacattctctga

SEQ ID NO: 3494 - DNA, 260 bp, Artificial Sequence
  Description of Artificial Sequence: Synthetic polynucleotide
tttatcgtgaaagaagttaccattgtggattctgacaccatatatattgaaacgtattaaagaggggtgtatgcaccccccttttgtaattacaatctcattttcaatacacctcgctgcatacgtcgccacctttgtcccttttccagcggaatagctttcaattcctttaataagcccgatcgttccgatggagattaagtcctctgcatcctcacctgtattttcgaactttttcacaatatgggcgaccaagcgaa

SEQ ID NO: 3495 - DNA, 260 bp, Artificial Sequence
  Description of Artificial Sequence: Synthetic polynucleotide
tatgcgggtgaaaagacgagacgagttgagggatcggcctacgaatacgaaagcgattgacattccgaacgaatgaaacaatatccgactcagcgatttggaaaggaattctccatggctaagactaccggactgccgacccttgaagacctcgttgacgttccgcgcggtgatttgctcaaactgagggcgaatgtcgaagaagctcttagggccaatgaagctcgcgaaaagcaagctgctaaggacaagatcaagga

SEQ ID NO: 3496 - DNA, 260 bp, Artificial Sequence
  Description of Artificial Sequence: Synthetic polynucleotide
ctgtcgtacgtcggcgagcccggcttcaagccggtcggcggcaaccgggccaagcagtagctacgccagcgccatggggagcgtcggcgccgcgagcagcgggtcgggggccggcgcgggagggaacgggcggcgcttgaaccagatctgaatccagagcccgtcgccgccgagacgtagcaacaggtcgttcatggcgtcccgcagctggctggtgcagtagcggtcgctgaccaggtgtatgcaccagccgtcgtcct

SEQ ID NO: 3497 - DNA, 260 bp, Artificial Sequence
  Description of Artificial Sequence: Synthetic polynucleotide
aaatcactaattaataaaatttatatcgacggtgaacaagttactattgaatggctctagtagcttgtttatttagattgtttagtatctcgttatctctcgttggacgtaaagagggaacaaagcatctaataggtgtcactcataagccgcctattattattgaccctgttacttctacctatgtattccctactgtcgcgccaagttcaacagattgtatttggatttttccacagcatattaaggattatcatgca

SEQ ID NO: 3498 - DNA, 260 bp, Artificial Sequence
  Description of Artificial Sequence: Synthetic polynucleotide
aaatcactaattaataaaatttatattgacggtgaacaagttactattgaatggctctagtagcttgtttatttagattgtttagttcctcgttttctctcgttggacggaaacgaatcgagaaactaaaattataaataaaaagtaacctgtttttctatagattgctttttatcgcatgcctctcgcctgtcccctcagttcagtaatttcctgcatttgcctgtttccagtcggtagatattccacaaaacagcagg

SEQ ID NO: 3499 - DNA, 260 bp, Artificial Sequence
  Description of Artificial Sequence: Synthetic polynucleotide
aaaggaattaaagggaagcgccagaactcattgaagattacgggtatagagttttattaattggaagttcggaataactatgcagttacctcgttcgccaattatttttcgcaatataaaaagtcccacttaaaacaatcattttaagcgggactttttatattgagtaactaaaattatttagctgctacttcttcgccattgtaagaaccacagtttttacatacacggtgtgataatttgtattcgccacagtttgg

SEQ ID NO: 3500 - DNA, 260 bp, Artificial Sequence
  Description of Artificial Sequence: Synthetic polynucleotide
actggtaacactagccggaaaaggaattcgcttaaaattactagtatcgaattttattaataaactatggaagtatgtacagtcttgcaaccacggttgtatcccgtctaaagtactcgtacatgatgggattgatggtacagactttggtactgccttttcaagaaaaaaagacgtagtcagcgcactaaataagaaaaactatgataacttagcaaatgatacaaacattgaagtattcaattacaaagcgcaattca

SEQ ID NO: 3501 - DNA, 152 bp, Artificial Sequence
  Description of Artificial Sequence: Synthetic polynucleotide
cacgttaaaagagggaaaactaagcattctatcaaaataaaaaacattgatttttattaacttcttttgtgcggaactacgaacagttcattaatacgaagtgtacaaacttccatacaaaaataaccacgtcaattaagacgtggtttcta

SEQ ID NO: 3502 - DNA, 260 bp, Artificial Sequence
  Description of Artificial Sequence: Synthetic polynucleotide
aaataacccctatcctaaggtttaatttcatttttgacctcacagccactaataatttccactaagaaaagtagtaagtatcttaaaaaacagataaagctgtatctcctgtgaacacaatgggtgccaccaagctgttatctgaaaagctgtttcatcaagcaaaccgccacgtccaaaacaaaggaaccttgttttgttcggtccgctttggaaatgttctcggttccagaggttcggtcatccccatattatttgaa

SEQ ID NO: 3503 - protein, 707 aa, Artificial Sequence
  Description of Artificial Sequence: Synthetic polypeptide
MSRTSRITALYERLSRDDDLTGESNSITNQKKYLEDYARRNGFENIRHFTDDGFSGVNFNRPGFQSLIKEVEAGNVETLIVKDMSRLGRNYLQVGFYTEVLFPQKNVRFLAINNSIDSNNASDNDFAPFLNIMNEWYAKDTSNKIKAIFDARMKDGKRCSGSIPYGYNRLPSDKQTLVVDPVASEVVKRIFTLANDGKSTRAIAEILTEEKVLTPAAYAKEYHPEQYNGNKFTNPYLWAMSTIRNILGRQEYLGHTVLRKSVSTNFKLHKRKSTDEEEQYVFPNTHEPIISQELWDSVQKRRSRVNRASAWGTHSNRLSGYLYCADCGRRMTLQTHYSKKDGSVQYSYRCGGYASRVNSCTSHSISTDNVEALILSSVKRFSRFVLNDEQAFALELQSLWNEKQEEKPKHNQSELQRCQKRYDELSTLVRGLYENLMSGLLPERQYKQLMKQYDDEQAELETKMETMKTELAEEKVSSVDIKHFISLIRKCKNPTEISDTMFNELVDKIVVYEAEGVGKARTQKVDIYFNYVGQVDIAYTEEELAEIETQKEQEEQQRLARQRKREKAYREKRKAQKIAENGGEIVKTKVCPHCNKEFIPTSNRQVFCSKECCYQARQDKKKTDREAERGNHYYRQRVCAVCGNSYWPTHSQQKFCSEECQRVNHNKKTLEFYHHKKEKEKLQCKDLSQTKERVSDMNLSGTITTPA

SEQ ID NO: 3504 - protein, 533 aa, Artificial Sequence
  Description of Artificial Sequence: Synthetic polypeptide
MLKQQANNKEKVALYSRLSRDDGLDKESNSIANQREMLKRYAKENKFYVYDEYIDDGFSGTTFNRPALNRMFEDIEAGKVNVVLVKDMSRLGRNNALFMYYVEEVFPDLDVRFIAINDMVDTAQDDNEIMPFKSVLNEYYARDISKKIRSSIRTTALTGGFTGAFAPYGYLVDPENKKKLIVDPETAPIVKRIFELSQQGTSTHQIARILCKDGILVPRAYRAKKKGILEQSKGFTFPTDWVGKNVKMILENQVYLGHMVSHKSQTKSFKNKKIVPVPKEDWIVVENTHEAIIDKETFEIVQKFISVKKQPNKTGKPNIFVGLVKCPDCGRNLAYSNPNGNEPRFRCRTYARNTELCTTHAISYKALYEIVQNDIKNHVNSMEELGDHFIKEMRELSETSGSQKIHQFNQELVSLEKRIDEIDSIFTKLIEQNALGKITDERFSKMSMNYETEQAEVVQSYRELKSKIKSEEEKVQGTDRFLETISKYKDVTELNRSMLCELIDSIYVYQAEGIGKERTQKVEINYRFLAVSH

SEQ ID NO: 3505 - protein, 513 aa, Artificial Sequence
  Description of Artificial Sequence: Synthetic polypeptide
MKYLALHENSRIAVYSRKSREDRDSEDTLAKHRNELEYLIKRENFKNVQWFEKVVSGETIDERPMFSLLLPRIENGEFDAVCAVAMDRLSRGSQIDSGRILEAFKQSGTLFITPKKTYDLSIEGDEMLSEFESIIARSEYRAIKRRTINGKKNATREGRLHSGSVPYGYKWDKNLKAAVVVEEKKKIYRMMIKWFLEEEYSCTVIAEMLNELKVPSPSGRSIWYGEVVSEILSNDFHRGYVWFGKYKKSKSNNSIVQNKNLDEVLIAKGHHETMKTDEEHALILNRIEKLRTYKVAGRRLNMNTHRLSGIVRCPYCHKAQAIEQPKGRRKHVRKCLRKSAERTKECEETKGIHEEVLFQSIMKEIKKYNESLFSPTEQDVNDDSYTAQLIGLREKAVKKAKGRIERIKEMYLDGDISKTEYKEKLKISQETLQKAENELAELIASTEFQNALSAETKKEKWSHHKVQEMIESTDGMSNSEINLILKMLISHVTYTVEDLGDGTKNLNIKVYYN

SEQ ID NO: 3506 - protein, 592 aa, Artificial Sequence
  Description of Artificial Sequence: Synthetic polypeptide
MKITLLYYIKKFNIYCNRYLSQQINISVDIIGFYQFKNVTNSVTDVLKRGDNLDRICIYLRKSRADEELEKTIGVGETLSKHRKALLKFAKEKKLNIMEIKEEIVSADSIFFRPKMIELLKEVENNQYTGVLVMDIQRLGRGDTEDQGIIARIFKESHTKIITPMKTYDLDDDLDEDYFEFESFMGRKEYKMIKKRMQGGRVRSVEDGNYIATNPPFGYDIHWINKSRTLKFNSKESEIVKLIFKLYTEGNGAGTISNYLNSLGYKTKFGNNFSNSSIIFILKNPVYIGKITWKKKDIRKSKDPHKVKDTRTRDKSEWIIADGKHEPIIDEKIWNKAQEILNNKYHIPYKIANGPANPLAGVVICSKCNSKMVMRKYGKKLPHLICNNKECNNKSARFDYIEKAVLEGLDEYLKNYKVNVKANNKTSDIEPYEQQSNALNKELILLNEQKLKLFDFLEREIYTEEIFLERSKNLDERINTTTLAINKIKKILDNEKKKNNKNDIVKFEKILEGYKKTNDIQKKNELMKSLVFKIEYKKEQHQRNDGLLYIYFLSFCVRCISYLTQFISFFVYPYRILEIYLTFSFFIISYEH

SEQ ID NO: 3507 - protein, 540 aa, Artificial Sequence
  Description of Artificial Sequence: Synthetic polypeptide
MKAIAIYARKSLFTGKGDSIGAQVDTCKRFIDYKFANEDYEIRTFKDEGWSGKTTDRPDFTNMVNLIKSKKIDYVITYKLDRIGRTARDLHNFLYELDNLGIVYLSATEPYDTTTSAGRFMISILAAMAQMERERLAERVKSGMIQIAKKGRWLGGQCPLGFDSKREIYIDDMGKERQMMRLTPNKEEIKIVKLIYDKYLEMGSMSQVRKYCLENSIRGKNGGDFSTNTLKQLLTSPIYVKSSDNIFKYLESQNINVFGTPNGNGMLTFNKTKEIRIERDKSEWIAAVGKHKGIIDDNKWLQIQQQLQQQSEKQIKSSGRQGTTSTGLLSGIIKCSKCGNNLLIKTGHKSKKNPGTTYSYYVCGKKDNSYGHKCDNKNVRTDEADSAVITQLKLYNKELLIKNLKEALIQNEKTDTDNIEILESKLKEKEKAVSNLVKKLSLIDDESISNIILNEVTNINKEINDIKLQLSNETLKINEVTKATLDTEIYIKILENFNKKIDDITDPIEKMNLLKSALESVEWNGDSGEFKINLIGSKKK

SEQ ID NO: 3508 - protein, 447 aa, Artificial Sequence
  Description of Artificial Sequence: Synthetic polypeptide
MLRCAIYIRVSTEEQAMHGLSMDAQKADLTDYAKKHNYEIIDYYVDSGKTARKRLSKRKDLQRMIEDVKLNKIDIIIFTKLDRWFRNVRDYYKIQEVLEDHNVDWKTIFENYDTSTANGRLHINIMLSVAQDEADRTSERIKRVFENKLKNNEPTSGSLPIGYKIKEKSIIIDEEKAPIAKDVFDFYYYHQSQTKVFKEILNKYNLSLCEKTIRRMLENKLYIGIYREHENFCPPLIDKNKFDEVQLILKRRNIKYIPTKRIFLFTSLLICKECRHKMIGNAQIRNTKAGKIEYILYRCNQSYARHTCNHRKVIYENKIETYLLNNIESELKKFIYDYELEDIPKVKNKVNKTNIKRKLEKLKELYINDLIDIDMYKEDYKKYTEILNTKEEKIEQRNLQPLKDFLNSDFKSLYSSISREEKRLLWRGIISEIQIDCNNDITIIPHP

SEQ ID NO: 3509 - protein, 500 aa, Artificial Sequence
  Description of Artificial Sequence: Synthetic polypeptide
MIAIYVRVSTEEQAIKGSSIDSQIEACIKKAGTKDVLKYADEGFSGELLERPALNRLREDASKGLISQVICYDPDRLSRKLMNQLIIDDELRKRNIPLIFVNGEYANSPEGQLFFAMRGAISEFEKAKIKERTSSGRLQKMKKGMIIKDSKLYGYKFVKEKRTLEILEEEAKIIRMIFNYFTDHKSPFFGRVNGIALHLTQMGVKTKKGAKVWHRQVVRQILMNSSYKGEHRQYKYDTEGSYVSKQAGNKSIIKIRPEEEQITVTIPAIVPAEQWDYAQELLGQSKRKHLSISPHNYLLSGLVRCGKCGNTMTGKKRKSHGKDYYVYTCRKNYSGAKDRGCGKEMSENKLNRHVWGEIFKFITNPQKYVSFKEAEQSNHLSDELELIEKEIEKTKKGRKRLLTLISLSDDDDLDIDEIKAQIIELQKKQNQLTEKCNRIQSKMKVLDDTSSSENALKRAIDYFQSIGADNLTLEDKKTIVNFIVKEVTIVDSDTIYIETY

SEQ ID NO: 3510 - protein, 460 aa, Artificial Sequence
  Description of Artificial Sequence: Synthetic polypeptide
MKVAIYTRVSSAEQANEGYSIHEQKKKLISYCEIHDWNEYKVFTDAGISGGSMKRPALQKLMKHLSSFDLVLVYKLDRLTRNVRDLLDMLEEFEQYNVSFKSATEVFDTTSAIGKLFITMVGAMAEWERETIRERSLFGSRAAVREGNYIREAPFCYDNIEGKLHPNEYAKVIDLIVSMFKKGISANEIARRLNSSKVHVPNKKSWNRNSLIRLMRSPVLRGHTKYGDMLIENTHEPVLSEHDYNAINNAISSKTHKSKVKHHAIFRGALVCPQCNRRLHLYAGTVKDRKGYKYDVRRYKCETCSKNKDVKNVSFNESEVENKFVNLLKSYELNKFHIRKVEPVKKIEYDIDKINKQKINYTRSWSLGYIEDDEYFELMEEINATKKMIEEQTTENKQSVSKEQIQSINNFILKGWEELTIKDKEELILSTVDKIEFNFIPKDKKHKTNTLDINNIHFKF

SEQ ID NO: 3511 - protein, 463 aa, Artificial Sequence
  Description of Artificial Sequence: Synthetic polypeptide
MKVATYVRVSTDEQAKEGFSIPAQRERLRAFCESQGWEIVEEYIEEGWSAKDLDRPQMQRLLKDIKKGNIDIVLVYRLDRLTRSVLDLYLLLQTFEKYNVAFRSATEVYDTSTAMGRLFITLVAALAQWERENLAERVKFGIEQMIDEGKKPGGHSPYGYKFDKDFNCTIIEDEANTVRMIYRMYCDGYGYHSIAKRLNELGIKPRIAKEWNHNSVRDILTNDIYIGTYRWGNKVVLNNHPPIISETLFRKVQKEKEKRRVDRTRVGKFLLTGLLYCGNCNGHKMQGTFDKREQKTYYRCLKCNRITNEKNILEPLLDEIQLLITSKEYFMSKFSDQYDQKEEVDVSALKKELEKIKRQKEKWYDLYMDDRNPIPKEDLFAKINELNKKEEEIYNKLNEVEPEDKEPVEEKYNRLSKMIDFKQQFEQANDFTKKELLFSIFEKIVIYREKGKLKKITLDYTLK

SEQ ID NO: 3512 - protein, 582 aa, Artificial Sequence
  Description of Artificial Sequence: Synthetic polypeptide
MTNPASRPKAYSYIRMSSAIQIKGDSFRRQAEASAKYAAEHDLDLIDDYKLADLGVSAFKSDNLTTGALGRFVAECEAGEIEAGSFLLIESLDRLSRDKILDAFSLFARILKTGVKIVTLSDGQVYDGSSDQVGSIYYAISVMIRSNDESKIKSTRGLANWSQKRKLAAEHGVKMSSQCPAWLKLSVDRKSYLIDKERAKIVQRIFEASASGKGANLITKELNRDKVPTFGRGALWAEAFVSKTLRNRAVLGEFQPGQYVSGKRQPAGDPIPGYFPPVIEEELFDIVQASLRGRLLAGGRRGEGQSNIFTHVAFCGYCGSKMRHRSKGSRVKGNPPHRYLTCFNRFNGPGCDCKPLPYAAFERSFLTFVRDVDLRGLLEGAKRKSEAKTIADRITVNEEKVRKADERIRDYLIKIEGAPDLAEIFMERIRELKAEKDDLVRSIEESNDALSKIKSDNVTDEELASLISTFQNPCGENRIRLADRIKSIIERIDVYPNGEIRKDDPAIDLVRASGDPDAEKIIAAMNAGSRLKDDPYFIVTFRNGAVQTVVPNPSNPDDIRVSVYAGEKTRRVEGSAYEYESD

SEQ ID NO: 3513 - protein, 519 aa, Artificial Sequence
  Description of Artificial Sequence: Synthetic polypeptide
MQLDATLTLRDEGLSAFHQRHIKQGALGVFLRAIEDGRIQPGSVLIVEGLDRLSRAEPIQAQAQLAQIINAGITVVTASDGREYNRERLKAQPMDLVYSLLVMIRAHEESDTKSKRVKAAIRRQCEGWVAGTWRGIIRNGKDPHWVRLGEHGKFEHVPERVLAVRTMIDLFLEGHGAIEITRRLTEQNLYVSNAGNYSVHMYRIVRNQALIGEKRISVDGEEFRLDGYYPPILTREEFAELQQTMSERGRRKGKGEIPNIITGLSITVCGYCGRAMTTQNSKARAPKGKSVVRRLSCPMNSFNEGCPIGGSCESEIVERALMRYCSDQFNLSRLLEGDDGTARRTAQLAVARQRASDIEAQIQRVTDALLSDDGKAPAAFTRRARELETQLEEQRREIEALEHQIAASSAHGIPAAAEAWAQLVDGVLALDYDARMKARQLVADTFRKIVVYQRGFAPIDDAAADRWKRSGTIGLMLVTKRGGMRLLNVDRRTGCWQAEDDLDPSLIPSDGLPMLPLDA

SEQ ID NO: 3514 - protein, 463 aa, Artificial Sequence
  Description of Artificial Sequence: Synthetic polypeptide
MRAAVYLRISEDRSGEQLGVARQREDCLKLCGQRKWVPVEYLDNDVSASTGKRRPAYEQMLADITAGKIAAVVAWDLDRLHRRPIELEAFMSLADEKRLALATVAGDVDLATPQGRLVARLKGSVAAHETEHKKARQRRAARQKAERGHPNWSKAFGYLPGPNGPEPDPRTAPLVKQAYADILAGASLGDVCRQWNDAGAFTITGRPWTTTTLSKFLRKPRNAGLRAYKGARYGPVDRDAIVGKAQWSPLVDEATFWAAQAVLDAPGRAPGRKSVRRHLLTGLAGCGKCGNHLAGSYRTDGQVVYVCKACHGVAILADNIEPILYHIVAERLAMPDAVDLLRREIHDAAEAETIRLELETLYGELDRLAVERAEGLLTARQVKISTDIVNAKITKLQARQQDQERLRVFDGIPLGTPQVAGMIAELSPDRFRAVLDVLAEVVVQPVGKSGRIFNPERVQVNWR

SEQ ID NO: 3515 - protein, 509 aa, Artificial Sequence
  Description of Artificial Sequence: Synthetic polypeptide
MPIAPEFLSLAYPGQEFPAYLYGRASRDPKRKGRSVQSQLDEGRATCLDAGWPIAGEFKDVDRSASAYARRTRDEFEEMIAGIQAGECRILVAFEASRYYRDLEAYVRLRRVCREAGVLLCYNGQVYDLSKSADRKATAQDAVNAEGEADDIRERNLRTTRLNAKRGGAHGPVPDGYKRRYDPDSGDLVDQIPHPDRAGLITEIFRRAAAAEPLAAICRDLNERGETTHRGKAWQRHHLHAILRNPAYIGHRRHLGVDTGKGMWAPICDDEDFAETFQAVQEILSLPGRQLSPGPEAQHLQTGIALCGEHPDEPPLRSVTVRGRTNYNCSTRYDVAMREDRMDAFVEESVITWLASDEAVAAFEDNTDDERTRKARIRLKVLEEQLEAAQKQARTLRPDGMGMLLSIDSLAGLEAELTPQIDKARQESRSLHVPALLRDLLGKPRADVDRAWNEALTLPQRRMILRMVVTIRLFKAGSRGVRAIEPGRITLSYVGEPGFKPVGGNRAKQ

SEQ ID NO: 3516 - protein, 474 aa, Artificial Sequence
  Description of Artificial Sequence: Synthetic polypeptide
MAVGIYIRVSTQEQASEGHSIESQKKKLASYCEIQGWDDYRFYIEEGISGKNTNRPKLKLLMEHIEKGKINILLVYRLDRLTRSVIDLHKLLNFLQEHGCAFKSATETYDTTTANGRMSMGIVSLLAQWETENMSERIKLNLEHKVLVEGERVGAIPYGFDLSDDEKLVKNEKSAILLDMVERVENGWSVNRIVNYLNLTNNDRNWSPNGVLRLLRNPALYGATRWNDKIAENTHEGIISKERFNRLQQILADRSIHHRRDVKGTYIFQGVLRCPVCDQTLSVNRFIKKRKDGTEYCGVLYRCQPCIKQNKYNLAIGEARFLKALNEYMSTVEFQTVEDEVIPKKSEREMLESQLQQIARKREKYQKAWASDLMSDDEFEKLMVETRETYDECKQKLESCEDPIKIDETYLKEIVYMFHQTFNDLESEKQKEFISKFIRTIRYTVKEQQPIRPDKSKTGKGKQKVIITEVEFYQ

SEQ ID NO: 3517 - protein, 464 aa, Artificial Sequence
  Description of Artificial Sequence: Synthetic polypeptide
MKRAALYIRVSTMEQAKEGYSIPAQTDKLKAFAKAKDMAVAKVYTDPGFSGAKMERPALQEMISDIQNKKIDVVLVYKLDRLSRSQKNTLYLIEDVFLKNNVDFISMQESFDTSTPFGRATIGMLSVFAQLERDTITERMHMGRTERAKQGYYHGSGIVPLGYDYVHGELIINDYEAQIIQEIYDLYVNQGKGQQYITKRMVAKYPDKVKTLTIVKYALTNPLYIGKISWDGKVYDGHHSPIIDKSMYDKAQEIIARMAQKGGEQHGNQLGLLLGITYCGKCGAEVFRYVSGGKKYRYNYYMCRSVKKMLPSLVKDWNCKQPSLRQEVVEKKVIDSLKSLDFKKIERELKQVENKTKSKITTINNQISKKHNEKQKILDLYQYGTFDVTMLNERMKKIDNEINALTANIANLEGTKSESLINKLETLKTFNWETETTENKILIIKEFVERIELFDDEVIIKYKF

SEQ ID NO: 3518 - protein, 452 aa, Artificial Sequence
  Description of Artificial Sequence: Synthetic polypeptide
MKAAIYIRVSTQEQVENYSIQAQTEKLTALCRSKDWDVYDTFIDGGYSGSNMNRPALNEMLSKLHEIDAVVVYRLDRLSRSQKDTITLIEEYFLKNNVEFVSLSETLDTSSPFGRAMIGILSVFAQLERETIRDRMVMGKIKRIEAGLPLTTAKGRTFGYDVIDTKLYINEEEAKQLRLIYDIFEEEQSITFLQKRLKKLGFKVRTYNRYNNWLTNDLYCGYVSYKDKVHVKGIHEPIISEEQFYRVQEIFSRMGKNPNMNKESASLLNNLVVCSKCGLGFVHRRKDTVSRGKKYHYRYYSCKTYKHTHELEKCGNKIWRADKLEELIIDRVNNYSFASRNIDKEDELDSLNEKLKIEHAKKKRLFDLYINGSYEVSELDSMMNDIDAQINYYEAQIEANEELKKNKKIQENLADLATVDFNSLEFREKQLYLKSLINKIYIDGEQVTIEWL

SEQ ID NO: 3519 - protein, 452 aa, Artificial Sequence
  Description of Artificial Sequence: Synthetic polypeptide
MKAAIYIRVSTQEQIENYSIQAQTEKLTALCRSKDWDVYDIFIDGGYSGSNMNRPALNEMLSKLHEIDAVVVYRLDRLSRSQRDTITLIEEYFLKNNVEFVSLSETLDTSSPFGRAMIGILSVFAQLERETIRDRMVMGKIKRIEAGLPLTTAKGRTFGYDVIDTKLYINEEEAKQLQMIYDIFEEEKSITTLQKRLKKLGFKVKSYSSYNNWLTNDLYCGYVSYADKVHTKGVHEPIISEEQFYRVQEIFSRMGKNPNMNRDSASLLNNLVVCGKCGLGFVHRRKDTVSRGKKYHYRYYSCKTYKHTHELEKCGNKIWRADKLEELIIDRVNNYSFASRNVDKEDELDSLNEKLKTEHVKKKRLFDLYISGSYEVSELDAMMADIDAQINYYEAQIEANEELKKNKKIQENLADLATVDFDSLEFREKQLYLKSLINKIYIDGEQVTIEWL

SEQ ID NO: 3520 - protein, 470 aa, Artificial Sequence
  Description of Artificial Sequence: Synthetic polypeptide
MKGESELDKKAAIYIRVSTQEQATEGYSIQAQTDRLIKYVEAKDFILYKKYIDAGYSASKLERPAMQDLIQDVQSKKVDVVIVYKLDRLSRSQKDTMYLIEDIFRPNDVELISMQESFDTSTAFGSATVGMLSVFAQLERKSISERMITGRVERAKKGFYHTGGQDRPPAGYQFNSDNQLIINEYEAAAIKDLFRLYNDGLGKSSISEYLKKNYPGKNKWLPSSIDRMLKNSLYIGKVKFSGAEYDGIHEPIIDEVTFYKTQKEIARRKQTNTKRYNYVALLGGLCECGICGAKMANRRAVGRKGKVYRYYRCYSKKGSPKHMMKTDGCSSKAQQQFIIDEAVINNLKNIDVEAELKRRSAPQTNTSLISSQIESIDKQINKLIDLFQVDSMPLDVISEKIDKLNKEKQSMEKLLERKNKLDKTELQHRFDVLKSFDWDNSSIESKRVVIEMLVQKVIIHDNSIEIILVE

SEQ ID NO: 3521 - protein, 452 aa, Artificial Sequence
  Description of Artificial Sequence: Synthetic polypeptide
MKAAIYIRVSTQEQIENYSIQAQTEKLTALCRSKDWDVYDIFIDGGYSGSNMNRPALNEMLSKLHEIDAVVVYRLDRLSRSQRDTITLIEEYFLKNNVEFVSLSETLDTSSPFGRAMIGILSVFAQLERETIRDRMVMGKIKRIEAGLPLTTAKGRTFGYDVIDTKLYINEEEAKQLQMIYDIFEEEKSITTLQKRLKKLGFKVKSYSSYNNWLTNDLYCGYVSYADKVHTKGVHEPIISEEQFYRVQEIFSRMGKNPNMNRDSASLLNNLVVCGKCGLGFVHRRKDTISRGKKYHYRYYSCKTYKHTHELEKCGNKIWRADKLEELIIDRVNNYSFASRNVDKEDELDNLNEKLKTEHKKKKRLFDLYISGSYEVSELDAMMADIDAQINYYEAQIEANEELKKNKKIQENLADLATVDFDSLEFREKQLYLKSLINKIYIDGEQVTIEWL

SEQ ID NO: 3522 - protein, 504 aa, Artificial Sequence
  Description of Artificial Sequence: Synthetic polypeptide
MRICMYLRKSRADEELEKTLGEGETLSKHRKALLKFAKEKNLNIVEIKEEIVSGESLFFRPKMLELLKEIENKQYSGVLVMDMQRLGRGNMQDQGIILETFKKSNTKIITPMKTYDLSNDFDEEYSEFEAFMSRKELKMINRRMQGGRVRSVEDGNYIATNAPYGYDIHWINKARTLKPNQKESEIVKLIFKLYIEGNGAGTIAKHLNSLGYKTKFGNSFNNSSIIFILKNPVYIGKITWKKKDIRKSKDPNKVKDTRTRDKSEWIIVDGKHDPIIDQITWKQAQEILNNRYHVPYKLVNGPANPLAGLIICTTCKSKMVMRKLRGTDRILCKNNKCNNISNRFDAVEKSVVESLENYLKAYKVNLPELNKTSNLKLYEQQISTLKKELKILNEQKLKLFDFLERGIYDEDTFLKRSKNLDERIEITNESLSNLNQIIAKENKAIKKEDIIKFEKVLDSYKSTADIRLKNELMKTLIFKIEYTKNKKGNDFKIKVFPKLKPLNI

SEQ ID NO: 3523 - protein, 545 aa, Artificial Sequence
  Description of Artificial Sequence: Synthetic polypeptide
MIAAIYSRKSKFTGKGESVENQIEMCKEYLKRNFNNIDDIEIYEDEGFSGKDTNRPKFKKMIKAAKNKKFNILICYRLDRISRNVADFSNTIEELQKYNIDFISIKEQFDTSTPMGRAMMNIAAVFAQLERETIAERIKDNMVELAKTGRWLGGTSPLGYKSEPIEYSNEDGKSKKMYKLTEVENEMNIVKLIYKLYLEKRGFSSVATYLCKNKYKGKNGGEFSRETARQIVINPVYCISDKTIFKWFKSKGATTYGTPDGIHGLMVYNKREGGKKDKPINEWIIAVGKHRGVISSDIWLKCQNLIQQNNAKSSPRSGTGEKFLLSGMVVCKECGSGMSSWSHFNKKTNFMERYYRCNLRNRASNRCSTKMLNAYKAEEYVANYLKELDINAIKKMYHSNKKNIIDYDAKYEVNKLNKSIEENKKIIQGIIKKIALFDDLDILGMLKNELERLKKENDEMKIKLKELKSILELEDEEEIFLSTMEENISNFKKFYDFVNITQKRILIKGLVESIVWDTGGEEKILEINLIGSNTKLPSGKVKRRE

SEQ ID NO: 3524 - protein, 471 aa, Artificial Sequence
  Description of Artificial Sequence: Synthetic polypeptide
MTVGIYIRVSTEEQVKEGFSISAQKEKLKAYCTAQGWEDFKFYVDEGKSAKDMHRPLLQEMISHIKKGLIDTVLVYKLDRLTRSVVDLHNLLSIFDEFNCAFKSATEVYDTSSAMGRFFITIISSVAQFERENTSERVSFGMAEKVRQGEYIPLAPFGYTKGTDGKLIVNKIEKEIFLQVVEMVSTGYSLRQTCEYLTNIGLKTRRSNDVWKVSTLIWMLKNPAVYGAIKWNNEIYENTHEPLIDKATFNKVAKILSIRSKSTTSRRGHVHHIFKNRLICPACGKRLSGLRTKYINKNKETFYNNNYRCATCKEHRRPAVQISEQKIEKAFIDYISNYTLNKANISSKKLDNNLRKQEMIQKEIISLQRKREKFQKAWAADLMNDDEFSKLMIDTKMEIDAAEDRKKEYDVSLFVSPEDIAKRNNILRELKINWTSLSPTEKTDFISMFIEGIEYVKDDENKAVITKISFL

SEQ ID NO: 3525 - protein, 580 aa, Artificial Sequence
  Description of Artificial Sequence: Synthetic polypeptide
MDPQHKPTRALIVIRLSRLTDETTSPERQLEACERFCAARGWEVVGVAEDLDVSAGTTSPFERPSLSQWIGDGKDNPGRIGEFDTVVFYRVDRLVRRVRHLHDVIAWSERFDVNMVSATESHFDLSTTIGALIAQLVASFAEMELEGISQRATSAHRHNVQLGKFVGGSPPFGYMPEETPDGWRLVHDPDVVPIILEVVDRVLEGEPLRRITDDLNARGATTARDLVKQRKGKETEGHKWHSNVLKRRLMSPAMLGYALRREPLTDSKGKPKLSAKGAKLYGPEEIVRGPDGLPVQRAEPILPKPLFDRVVAELEARELQKEPTKRINSMLLRVLYCGVCGQPVYRAKGQGGRSDRYRCRSIQDGANCGNPSVLTYELDDLVEESILVLMGDSERLAHVWNPGEDNASELAEVEARLADRTGLIGVGAYKAGTPQRATLDTLIEADAKLYERLKAATPRPAGWTWEPTGETFAEWWAALDTGARNVYLRNMGVRVTYDKRPVPEQVSAGEKPRVHLELGEVRKMAEQVAVTGTIGTLTRNYTRLGEIGITHVDIDAGSGKAVFVTKSGERFELPLNIPEE

SEQ ID NO: 3526 - protein, 516 aa, Artificial Sequence
  Description of Artificial Sequence: Synthetic polypeptide
MYRPESLDVCIYLRKSRKDVEEERRAIEEGSSYNALERHRKRLFAIAKAENHNIIDIFEEVASGESIQERPQMQQLLRKLEGNEIDGVLVIDLDRLGRGDMLDAGMIDRAFRYSSTKIITPTDVYDPDDESWELVFGIKSLISRQELKSITKRLQNGRIDSVKEGKHIGKKPPYGYLKDENLRLYPDPEKAWIVKKIFELMCDGKGRQMIAAELDRLGIDPPVTKRGAWDSSTITSIIKNEVYTGVIVWGKFKHKKRNGKYTRHKNPQEKWIMYENAHEPIISKELFDAANEAHSSRHKPAVITSKKLTNPLAGILKCKLCGYTMLIQTRKDRPHNYLRCNNPACKGKQKQSVFNLVEEKLLYSLQQIVDEYQAQKVEEVEIDDSKLISFKEKAIISKEKELKELQAQKGNLHDLLEQGIYTVEIFLERQKNLVERITSIENDIEVLQKEIETEQIKEHNKTEFIPALKTVIESYHKTTNIELKNQLLKTILSTVTYYRHPDWKTNEFEIQVYFKI

SEQ ID NO: 3527 - protein, 515 aa, Artificial Sequence
  Description of Artificial Sequence: Synthetic polypeptide
MKTAIYLRKSRADLEAEARGEGETLAKHRSTLLKIAKEMNLNVLSVREEIVSGESLVKRPEMLALLEEIEDNKYDAVLCMDMDRLGRGGMKEQGIILETFKRSNTKIMTPRKTYDLNDEWDEEYSEFEAFMARKELKIITRRMQRGRIASVEAGNYLGTHAPFGYDIHRLNKRERTLTINSEEASVVRMIFDWYANEDMGASAIRNKLNDLGYKSKLGNDWNPYSILDILKNNIYIGKVTWQKRKEVKRPDAVKRSCARQDKSDWIIADGKHEPIIPESLFEQAQEKLNSRYHVPYNTNGIKNPLAGIIKCSKCGYSMVQRYPKNRKETMDCKHRGCENKSSYTELIEKRLLEALKEWYINYKADFEAHKQGDKLKETQVIQMNEAALRKLEKELVDVQKQKNNLHDLLERGVYTVDMFLERSQVISDRINEITSTMENLKKEIKTEIKKEKVKKDTIPQVEHVLDLYFKTDDPKKKNSLLKSVLEKAVYKKEKWQRLDDFELVLYPKLPQDGDI

SEQ ID NO: 3528 - protein, 485 aa, Artificial Sequence
  Description of Artificial Sequence: Synthetic polypeptide
MSKKVAIYTRVSTTNQAEEGYSIDEQIDKLKMYCEAMDWKVSEIYTDAGFTGSKLTRPAMEKMITDIGLKKFDTVIVYKLDRLSRSVRDTLYLVKDVFTKNEIDFISLSESIDTSSAMGSLFLTILSAINEFERENIKERMTMGKIGRAKSGKSMMWAKTAFGYSHNQETGILEINPLEASIVEQIFNEYLKGTSITKLRDKLNEDGHIAKELPWSYRTIRQTLDNPVYCGYIKYKNNTFEGLHKPIISHETYLSVQKELEARQQQTYEKNNNPRPFQAKYLLSGIARCGYCGAPLRIVLGHRRKDGSRTMKYQCVNRFPRKTKGVTTYNDNKKCDSGAYDMQWIEDIVLKTLNGFQKSDKKLRKILNIKEESKVDTSGFQKQLKSINNKIQKNSDLYLNDFITMDDLKKRTEMLQGEKKLIQARINEVDKPSTSEIFDLVKSELGETTISKISYEDKKKIVNNLISKVDVTADNIDIIFKFQLA

SEQ ID NO: 3529 - protein, 475 aa, Artificial Sequence
  Description of Artificial Sequence: Synthetic polypeptide
MITTNKVAIYVRVSTTNQVEEGYSIDEQKDKLEAYCKIKDWKIYDVYVDGGFSGANTQRPELERLISDVKRKKVDIVLVYKLDRLSRSQKDTLFLIEDVFAKNDVAFISLQENFDTSTPFGKASIGMLSVFAQLEREQIKERMMLGKEGRAKNGKSMSWTTIAFGYDYSKETGVLSVNPTQALIVNRIFTEYLNGKPVVKIIRDLNAEGHVGRKRPWGETITKYLLKNETYLGKVKYKDKVYEGQHEPIITQELFDLVQLEVERRQISAYEKYNNPRPFRAKYMLSGLMKCGYCGASLGLRYTRKDKNGISHHKYQCRNRHSKDLEKRCESGWYSKEELERGVIKELERIKFDPKYKNETLAKKEETIKVEEIKKQLERINNQVSKLTELYLDEIITRKELDEKNDKIKTERQFLEEQLENQKSNVLSIRKRKLTRLLKDFDVEKLSYEDASKIVKNIIKEIIVTKDGMSITLDF

SEQ ID NO: 3530 - protein, 461 aa, Artificial Sequence
  Description of Artificial Sequence: Synthetic polypeptide
MKVAVYCRVSTLEQKEHGHSIEEQERKLKSFCDINDWTVYDTYIDAGYSGAKRDRPELQRLMNDINKFDLVLVYKLDRLTRNVRDLLDLLEIFEKNDVSFRSATEVYDTTTAMGRLFVTLVGAMAEWERETIRERTQMGKLAALRKGIMLTTPPFYYDRVDNKFVPNKYKDVILWAYDEAMKGQSAKAIARKLNNSDIPPPNNTQWQGRTITHALRNPFTRGHFDWGGVHIENNHEPIITDEMYEKVKDRLNERVNTKKVRHTSIFRGKLVCPVCNARLTLNSHKKKSNSGYIFVKQYYCNNCKVTPNLKPVYIKEKEVIKVFYNYLKRFDLEKYEVTQKQNEPEITIDINKVMEQRKRYHKLYASGLMQEDELFDLIKETDQTIAEYEKQNENREVKQYDIEDIKQYKDLLLEMWDISSDEDKEDFIKMAIKNIYFEYIIGTGNTSRKRNSLKITSIEFY

SEQ ID NO: 3531 - protein, 460 aa, Artificial Sequence
  Description of Artificial Sequence: Synthetic polypeptide
MKVAIYTRVSTLEQREKGHSIDEQERKLRSFCDINDWTVKDVYVDAGFSGAKRDRPELTRLLDDISEFDLVLVYKLDRLTRSVRDLLDLLEVFENNNVAFRSATEVYDTTTAIGRLFVTLVGAMAEWERETIRERSLMGKRAAIKKGMILTAPPFYYDRVNNTYIPNQYKDVVLDVYNKVKKGYSIAHIARLYNNSDVKPPNGNEEWTTRMLMHALRNPVTRGHYQWGEIYIEDSHEPIITDEMYNTIIDRLDKHTNTKVVAHTSVFRGKLICPNCGYALTLNSQKRKRKNDTIVYKTYYCNNCKITKGMKPHHITETETLRVFKDHLSKIDLKQYETQEKEKQSHVTIDLSKVMEQRKRYHKLYASGMMQENELFELIKETDEMIEEYEKQRKQVDVKEFDICKIKEIKDVLLKSWDIFTLEDKADFIQMSIKAINIEYTKLKRGKSSNSMKIKDIEFY

SEQ ID NO: 3532 - protein, 462 aa, Artificial Sequence
  Description of Artificial Sequence: Synthetic polypeptide
MKVAIYVRVSTDEQAKEGFSIPAQRERLRAFCASQGWEIVQEYIEEGWSAKDLDRPQMQRLLKDIKKGNIDIVLVYRLDRLTRSVLDLYLLLQTFEKYNVAFRSATEVYDTSTAMGRLFITLVAALAQWERENLAERVKFGIEQMIDEGKKPGGHSPYGYKFDKDFNCTIIEEEADVVRMIYRMYCDGYGYRSIADRLNELMVKPRIAKEWNHNSVRDILTNDIYIGTYRWGDKVVPNNHPPIISETLFKKAQKEKEKRGVDRKRVGKFLFTGLLQCGNCGGHKMQGHFDKREQKTYYRCTKCHRITNEKNILEPLLDEIQLLITSKEYFMSKFSDRYDQQEVVDVSALTKELEKIKRQKEKWYDLYMDDRNPIPKEELFAKINELNKKEEEIYSKLSEVEEDKEPVEEKYNRLSKMIDFKQQFEQANDFTKKELLFSIFEKIVIYREKGKLKKITLDYTLK

SEQ ID NO: 3533 - protein, 545 aa, Artificial Sequence
  Description of Artificial Sequence: Synthetic polypeptide
MELKNIVNSYNITNILGYLRRSRQDMEREKRTGEDTLTEQKELMNKILTAIEIPYELKMEIGSGESIDGRPVFKECLKDLEEGKYQAIAVKEITRLSRGSYSDAGQIVNLLQSKRLIIITPYKVYDPRNPVDMRQIRFELFMAREEFEMTRERMTGAKYTYAAQGKWISGLAPYGYQLNKKTSKLDPVEDEAKVVQLIFKIFLNGLNGKDYSYTAIASHLTNLQIPTPSGKKRWNQYTIKAILQNEVYIGTVKYKVREKTKDGKRTIRPEKEQIVVQDAHAPIIDQEQFQQSQVKIANKVPLLPNKDEFELSELAGVCTCSKCGEPLSKYESKRMRKNKDGTESVYHVKSLTCKKNKCTYVRYNDVENAILDYLSSLNDLNDSTLTKHINSMLSKYEDDNSNMKTKKQMSEHLSQKEKELKNKENFIFDKYESGIYSDELFLKRKAALDEEFKELQNAKNELNGLQDTQSEIDSNTVRNNINKIIDQYHIESSSEKKNELLRMVLKDVIVNMTQKRKGPIPAQFEITPILRFNFIFDLTATNNFH

SEQ ID NO: 3534 - RNA, 21 nt, Artificial Sequence
  Description of Artificial Sequence: Synthetic oligonucleotide
cauaaaguagaaagcacuacu

SEQ ID NO: 3535 - RNA, 23 nt, Artificial Sequence
  Description of Artificial Sequence: Synthetic oligonucleotide
uguaguguuuccuacuuuaugga

SEQ ID NO: 3536 - RNA, 24 nt, Artificial Sequence
  Description of Artificial Sequence: Synthetic oligonucleotide
uuuggcaaugguagaacucacacu

SEQ ID NO: 3537 - RNA, 21 nt, Artificial Sequence
  Description of Artificial Sequence: Synthetic oligonucleotide
ugguucuagacuugccaacua

SEQ ID NO: 3538 - RNA, 22 nt, Artificial Sequence
  Description of Artificial Sequence: Synthetic oligonucleotide
uauggcacugguagaauucacu

SEQ ID NO: 3539 - RNA, 22 nt, Artificial Sequence
  Description of Artificial Sequence: Synthetic oligonucleotide
gugaauuaccgaagggccauaa

SEQ ID NO: 3540 - RNA, 10 nt, Artificial Sequence
  Description of Artificial Sequence: Synthetic oligonucleotide
  See specification as filed for detailed description of substitutions and preferred embodiments
aaaaaaaaaa

SEQ ID NO: 3541 - RNA, 20 nt, Artificial Sequence
  Description of Artificial Sequence: Synthetic oligonucleotide
  See specification as filed for detailed description of substitutions and preferred embodiments
aaaaaaaaaaaaaaaaaaaa

SEQ ID NO: 3542 - RNA, 30 nt, Artificial Sequence
  Description of Artificial Sequence: Synthetic oligonucleotide
  See specification as filed for detailed description of substitutions and preferred embodiments
aaaaaaaaaaaaaaaaaaaaaaaaaaaaaa

SEQ ID NO: 3543 - RNA, 50 nt, Artificial Sequence
  Description of Artificial Sequence: Synthetic oligonucleotide
  See specification as filed for detailed description of substitutions and preferred embodiments
aaaaaaaaaaaaaaaaaaaaaaaaaaaaaaaaaaaaaaaaaaaaaaaaaa

SEQ ID NO: 3544 - RNA, 70 nt, Artificial Sequence
  Description of Artificial Sequence: Synthetic oligonucleotide
  See specification as filed for detailed description of substitutions and preferred embodiments
aaaaaaaaaaaaaaaaaaaaaaaaaaaaaaaaaaaaaaaaaaaaaaaaaaaaaaaaaaaaaaaaaaaaaa

SEQ ID NO: 3545 - RNA, 100 nt, Artificial Sequence
  Description of Artificial Sequence: Synthetic polynucleotide
  See specification as filed for detailed description of substitutions and preferred embodiments
aaaaaaaaaaaaaaaaaaaaaaaaaaaaaaaaaaaaaaaaaaaaaaaaaaaaaaaaaaaaaaaaaaaaaaaaaaaaaaaaaaaaaaaaaaaaaaaaaaaa

SEQ ID NO: 3546 - DNA, 260 bp, Artificial Sequence; identical to SEQ ID NO: 316
  Description of Artificial Sequence: Synthetic polynucleotide

SEQ ID NO: 3547 - DNA, 260 bp, Artificial Sequence; identical to SEQ ID NO: 3478
  Description of Artificial Sequence: Synthetic polynucleotide

SEQ ID NO: 3548 - DNA, 260 bp, Artificial Sequence; identical to SEQ ID NO: 1960
  Description of Artificial Sequence: Synthetic polynucleotide

SEQ ID NO: 3549 - DNA, 260 bp, Artificial Sequence; identical to SEQ ID NO: 3479
  Description of Artificial Sequence: Synthetic polynucleotide

SEQ ID NO: 3550 - DNA, 260 bp, Artificial Sequence; identical to SEQ ID NO: 3480
  Description of Artificial Sequence: Synthetic polynucleotide

SEQ ID NO: 3551 - DNA, 260 bp, Artificial Sequence; identical to SEQ ID NO: 3479
  Description of Artificial Sequence: Synthetic polynucleotide

SEQ ID NO: 3552 - DNA, 260 bp, Artificial Sequence; identical to SEQ ID NO: 3478
  Description of Artificial Sequence: Synthetic polynucleotide

SEQ ID NO: 3553 - DNA, 260 bp, Artificial Sequence; identical to SEQ ID NO: 1294
  Description of Artificial Sequence: Synthetic polynucleotide

SEQ ID NO: 3554 - DNA, 89 bp, Artificial Sequence; identical to SEQ ID NO: 291
  Description of Artificial Sequence: Synthetic oligonucleotide

SEQ ID NO: 3555 - DNA, 260 bp, Artificial Sequence; identical to SEQ ID NO: 103
  Description of Artificial Sequence: Synthetic polynucleotide

SEQ ID NO: 3556 - DNA, 260 bp, Artificial Sequence; identical to SEQ ID NO: 3481
  Description of Artificial Sequence: Synthetic polynucleotide

SEQ ID NO: 3557 - DNA, 260 bp, Artificial Sequence; identical to SEQ ID NO: 22
  Description of Artificial Sequence: Synthetic polynucleotide

SEQ ID NO: 3558 - DNA, 260 bp, Artificial Sequence; identical to SEQ ID NO: 384
  Description of Artificial Sequence: Synthetic polynucleotide

SEQ ID NO: 3559 - DNA, 260 bp, Artificial Sequence; identical to SEQ ID NO: 3482
  Description of Artificial Sequence: Synthetic polynucleotide

SEQ ID NO: 3560 - DNA, 260 bp, Artificial Sequence; identical to SEQ ID NO: 3479
  Description of Artificial Sequence: Synthetic polynucleotide

SEQ ID NO: 3561 - DNA, 260 bp, Artificial Sequence; identical to SEQ ID NO: 964
  Description of Artificial Sequence: Synthetic polynucleotide

SEQ ID NO: 3562 - DNA, 260 bp, Artificial Sequence; identical to SEQ ID NO: 200
  Description of Artificial Sequence: Synthetic polynucleotide

SEQ ID NO: 3563 - DNA, 161 bp, Artificial Sequence; identical to SEQ ID NO: 3483
  Description of Artificial Sequence: Synthetic polynucleotide

SEQ ID NO: 3564 - DNA, 260 bp, Artificial Sequence; identical to SEQ ID NO: 3484
  Description of Artificial Sequence: Synthetic polynucleotide

SEQ ID NO: 3565 - DNA, 260 bp, Artificial Sequence; identical to SEQ ID NO: 964
  Description of Artificial Sequence: Synthetic polynucleotide

SEQ ID NO: 3566 - DNA, 91 bp, Artificial Sequence; identical to SEQ ID NO: 3485
  Description of Artificial Sequence: Synthetic oligonucleotide

SEQ ID NO: 3567 - DNA, 260 bp, Artificial Sequence; identical to SEQ ID NO: 3486
  Description of Artificial Sequence: Synthetic polynucleotide

SEQ ID NO: 3568 - DNA, 260 bp, Artificial Sequence; identical to SEQ ID NO: 3487
  Description of Artificial Sequence: Synthetic polynucleotide

SEQ ID NO: 3569 - DNA, 260 bp, Artificial Sequence; identical to SEQ ID NO: 1294
  Description of Artificial Sequence: Synthetic polynucleotide

SEQ ID NO: 3570 - DNA, 260 bp, Artificial Sequence; identical to SEQ ID NO: 1200
  Description of Artificial Sequence: Synthetic polynucleotide

SEQ ID NO: 3571 - DNA, 260 bp, Artificial Sequence; identical to SEQ ID NO: 384
  Description of Artificial Sequence: Synthetic polynucleotide

SEQ ID NO: 3572 - DNA, 260 bp, Artificial Sequence; identical to SEQ ID NO: 366
  Description of Artificial Sequence: Synthetic polynucleotide

SEQ ID NO: 3573 - DNA, 260 bp, Artificial Sequence; identical to SEQ ID NO: 3486
  Description of Artificial Sequence: Synthetic polynucleotide

SEQ ID NO: 3574 - DNA, 260 bp, Artificial Sequence; identical to SEQ ID NO: 3488
  Description of Artificial Sequence: Synthetic polynucleotide

SEQ ID NO: 3575 - DNA, 260 bp, Artificial Sequence; identical to SEQ ID NO: 3479
  Description of Artificial Sequence: Synthetic polynucleotide

SEQ ID NO: 3576 - DNA, 260 bp, Artificial Sequence; identical to SEQ ID NO: 54
  Description of Artificial Sequence: Synthetic polynucleotide

SEQ ID NO: 3577 - DNA, 260 bp, Artificial Sequence; identical to SEQ ID NO: 1294
  Description of Artificial Sequence: Synthetic polynucleotide

SEQ ID NO: 3578 - DNA, 260 bp, Artificial Sequence; identical to SEQ ID NO: 3479
  Description of Artificial Sequence: Synthetic polynucleotide

SEQ ID NO: 3579 - DNA, 260 bp, Artificial Sequence; identical to SEQ ID NO: 22
  Description of Artificial Sequence: Synthetic polynucleotide

SEQ ID NO: 3580 - DNA, 260 bp, Artificial Sequence; identical to SEQ ID NO: 3478
  Description of Artificial Sequence: Synthetic polynucleotide

SEQ ID NO: 3581 - DNA, 260 bp, Artificial Sequence; identical to SEQ ID NO: 366
  Description of Artificial Sequence: Synthetic polynucleotide

SEQ ID NO: 3582 - DNA, 260 bp, Artificial Sequence; identical to SEQ ID NO: 366
  Description of Artificial Sequence: Synthetic polynucleotide

SEQ ID NO: 3583 - DNA, 260 bp, Artificial Sequence; identical to SEQ ID NO: 1200
  Description of Artificial Sequence: Synthetic polynucleotide

SEQ ID NO: 3584 - DNA, 89 bp, Artificial Sequence; identical to SEQ ID NO: 291
  Description of Artificial Sequence: Synthetic oligonucleotide

SEQ ID NO: 3585 - DNA, 260 bp, Artificial Sequence; identical to SEQ ID NO: 3489
  Description of Artificial Sequence: Synthetic polynucleotide

SEQ ID NO: 3586 - DNA, 260 bp, Artificial Sequence; identical to SEQ ID NO: 54
  Description of Artificial Sequence: Synthetic polynucleotide

SEQ ID NO: 3587 - DNA, 75 bp, Artificial Sequence; identical to SEQ ID NO: 3490
  Description of Artificial Sequence: Synthetic oligonucleotide

SEQ ID NO: 3588 - DNA, 75 bp, Artificial Sequence; identical to SEQ ID NO: 3490
  Description of Artificial Sequence: Synthetic oligonucleotide

SEQ ID NO: 3589 - DNA, 280 bp, Artificial Sequence; identical to SEQ ID NO: 3491
  Description of Artificial Sequence: Synthetic polynucleotide

SEQ ID NO: 3590 - DNA, 260 bp, Artificial Sequence; identical to SEQ ID NO: 1960
  Description of Artificial Sequence: Synthetic polynucleotide

SEQ ID NO: 3591 - DNA, 260 bp, Artificial Sequence
  Description of Artificial Sequence: Synthetic polynucleotide
tgggatgactaccggctcgcccgcatcgagaagcgggggaagggggcgcagacggccgcctagggcgttctcgggggtgatgggggctggccggtggatcggtcggcccccttcgtttttcctggtcaggccctaatacgcaagtcgataactctcctgggagcgttgacaacttgcgcaccctgatctgacctgcgacgatgcccggcatgacaacagaaacagggccggaccccgccggactgatcgacttgttctgt

SEQ ID NO: 3592 - DNA, 260 bp, Artificial Sequence; identical to SEQ ID NO: 1202
  Description of Artificial Sequence: Synthetic polynucleotide

SEQ ID NO: 3593 - DNA, 260 bp, Artificial Sequence; identical to SEQ ID NO: 3492
  Description of Artificial Sequence: Synthetic polynucleotide

SEQ ID NO: 3594 - DNA, 72 bp, Artificial Sequence; identical to SEQ ID NO: 3493
  Description of Artificial Sequence: Synthetic oligonucleotide

SEQ ID NO: 3595 - DNA, 260 bp, Artificial Sequence; identical to SEQ ID NO: 956
  Description of Artificial Sequence: Synthetic polynucleotide

SEQ ID NO: 3596 - DNA, 161 bp, Artificial Sequence; identical to SEQ ID NO: 3483
  Description of Artificial Sequence: Synthetic polynucleotide

SEQ ID NO: 3597 - DNA, 260 bp, Artificial Sequence; identical to SEQ ID NO: 956
  Description of Artificial Sequence: Synthetic polynucleotide

SEQ ID NO: 3598 - DNA, 260 bp, Artificial Sequence; identical to SEQ ID NO: 3492
  Description of Artificial Sequence: Synthetic polynucleotide

SEQ ID NO: 3599 - DNA, 260 bp, Artificial Sequence; identical to SEQ ID NO: 384
  Description of Artificial Sequence: Synthetic polynucleotide

SEQ ID NO: 3600 - DNA, 260 bp, Artificial Sequence; identical to SEQ ID NO: 1200
  Description of Artificial Sequence: Synthetic polynucleotide

SEQ ID NO: 3601 - DNA, 260 bp, Artificial Sequence; identical to SEQ ID NO: 1016
  Description of Artificial Sequence: Synthetic polynucleotide

SEQ ID NO: 3602 - DNA, 260 bp, Artificial Sequence; identical to SEQ ID NO: 3494
  Description of Artificial Sequence: Synthetic polynucleotide

SEQ ID NO: 3603 - DNA, 260 bp, Artificial Sequence; identical to SEQ ID NO: 933
  Description of Artificial Sequence: Synthetic polynucleotide

SEQ ID NO: 3604 - DNA, 260 bp, Artificial Sequence; identical to SEQ ID NO: 1294
  Description of Artificial Sequence: Synthetic polynucleotide

SEQ ID NO: 3605 - DNA, 260 bp, Artificial Sequence; identical to SEQ ID NO: 3495
  Description of Artificial Sequence: Synthetic polynucleotide

SEQ ID NO: 3606 - DNA, 260 bp, Artificial Sequence; identical to SEQ ID NO: 956
  Description of Artificial Sequence: Synthetic polynucleotide

SEQ ID NO: 3607 - DNA, 260 bp, Artificial Sequence; identical to SEQ ID NO: 54
  Description of Artificial Sequence: Synthetic polynucleotide

SEQ ID NO: 3608 - DNA, 260 bp, Artificial Sequence; identical to SEQ ID NO: 1109
  Description of Artificial Sequence: Synthetic polynucleotide

SEQ ID NO: 3609 - DNA, 260 bp, Artificial Sequence; identical to SEQ ID NO: 3480
  Description of Artificial Sequence: Synthetic polynucleotide

SEQ ID NO: 3610 - DNA, 260 bp, Artificial Sequence; identical to SEQ ID NO: 3496
  Description of Artificial Sequence: Synthetic polynucleotide

SEQ ID NO: 3611 - DNA, 260 bp, Artificial Sequence; identical to SEQ ID NO: 54
  Description of Artificial Sequence: Synthetic polynucleotide

SEQ ID NO: 3612 - DNA, 260 bp, Artificial Sequence; identical to SEQ ID NO: 388
  Description of Artificial Sequence: Synthetic polynucleotide

SEQ ID NO: 3613 - DNA, 260 bp, Artificial Sequence; identical to SEQ ID NO: 3497
  Description of Artificial Sequence: Synthetic polynucleotide

SEQ ID NO: 3614 - DNA, 260 bp, Artificial Sequence; identical to SEQ ID NO: 3498
  Description of Artificial Sequence: Synthetic polynucleotide

SEQ ID NO: 3615 - DNA, 260 bp, Artificial Sequence; identical to SEQ ID NO: 384
  Description of Artificial Sequence: Synthetic polynucleotide

SEQ ID NO: 3616 - DNA, 89 bp, Artificial Sequence; identical to SEQ ID NO: 291
  Description of Artificial Sequence: Synthetic oligonucleotide

SEQ ID NO: 3617 - DNA, 260 bp, Artificial Sequence; identical to SEQ ID NO: 1294
  Description of Artificial Sequence: Synthetic polynucleotide

SEQ ID NO: 3618 - DNA, 260 bp, Artificial Sequence; identical to SEQ ID NO: 1277
  Description of Artificial Sequence: Synthetic polynucleotide

SEQ ID NO: 3619 - DNA, 260 bp, Artificial Sequence; identical to SEQ ID NO: 3497
  Description of Artificial Sequence: Synthetic polynucleotide

SEQ ID NO: 3620 - DNA, 260 bp, Artificial Sequence; identical to SEQ ID NO: 3499
  Description of Artificial Sequence: Synthetic polynucleotide

SEQ ID NO: 3621 - DNA, 260 bp, Artificial Sequence; identical to SEQ ID NO: 956
  Description of Artificial Sequence: Synthetic polynucleotide

SEQ ID NO: 3622 - DNA, 260 bp, Artificial Sequence; identical to SEQ ID NO: 964
  Description of Artificial Sequence: Synthetic polynucleotide

SEQ ID NO: 3623 - DNA, 260 bp, Artificial Sequence; identical to SEQ ID NO: 384
  Description of Artificial Sequence: Synthetic polynucleotide

SEQ ID NO: 3624 - DNA, 260 bp, Artificial Sequence; identical to SEQ ID NO: 956
  Description of Artificial Sequence: Synthetic polynucleotide

SEQ ID NO: 3625 - DNA, 260 bp, Artificial Sequence; identical to SEQ ID NO: 933
  Description of Artificial Sequence: Synthetic polynucleotide

SEQ ID NO: 3626 - DNA, 260 bp, Artificial Sequence; identical to SEQ ID NO: 3492
  Description of Artificial Sequence: Synthetic polynucleotide

SEQ ID NO: 3627 - DNA, 260 bp, Artificial Sequence; identical to SEQ ID NO: 1277
  Description of Artificial Sequence: Synthetic polynucleotide

SEQ ID NO: 3628 - DNA, 260 bp, Artificial Sequence; identical to SEQ ID NO: 1277
  Description of Artificial Sequence: Synthetic polynucleotide

SEQ ID NO: 3629 - DNA, 89 bp, Artificial Sequence; identical to SEQ ID NO: 291
  Description of Artificial Sequence: Synthetic oligonucleotide

SEQ ID NO: 3630 - DNA, 260 bp, Artificial Sequence; identical to SEQ ID NO: 1200
  Description of Artificial Sequence: Synthetic polynucleotide

SEQ ID NO: 3631 - DNA, 260 bp, Artificial Sequence; identical to SEQ ID NO: 3500
  Description of Artificial Sequence: Synthetic polynucleotide

SEQ ID NO: 3632 - DNA, 260 bp, Artificial Sequence; identical to SEQ ID NO: 964
  Description of Artificial Sequence: Synthetic polynucleotide

SEQ ID NO: 3633 - DNA, 152 bp, Artificial Sequence; identical to SEQ ID NO: 3501
  Description of Artificial Sequence: Synthetic polynucleotide

SEQ ID NO: 3634 - DNA, 152 bp, Artificial Sequence; identical to SEQ ID NO: 3501
  Description of Artificial Sequence: Synthetic polynucleotide

SEQ ID NO: 3635 - DNA, 260 bp, Artificial Sequence; identical to SEQ ID NO: 3502
  Description of Artificial Sequence: Synthetic polynucleotide

SEQ ID NO: 3636 - DNA, 72 bp, Artificial Sequence; identical to SEQ ID NO: 3493
  Description of Artificial Sequence: Synthetic oligonucleotide

SEQ ID NO: 3637 - DNA, 260 bp, Artificial Sequence
  Description of Artificial Sequence: Synthetic polynucleotide
cgagggcggccgttcgatggagacgagcgggtcaagatcaaatgggcggcgaggacgtagcggagtgaacacctcggaacgttcctaggtggctcgtgtgagctaggccacaacagaacacgatcagcggtcacggtgcctcacgcattgtggccgcttttcgtttgggggcgtttcacgccgacacagcggagagggtgaacaacactaccgacacccctctgacctgctcttatgttgtggagtgttgattctgatat

SEQ ID NO: 3638 - protein, 481 aa, Artificial Sequence; identical to SEQ ID NO: 2591
  Description of Artificial Sequence: Synthetic polypeptide

SEQ ID NO: 3639 - protein, 707 aa, Artificial Sequence; identical to SEQ ID NO: 3503
  Description of Artificial Sequence: Synthetic polypeptide

SEQ ID NO: 3640 - protein, 533 aa, Artificial Sequence; identical to SEQ ID NO: 3504
  Description of Artificial Sequence: Synthetic polypeptide

SEQ ID NO: 3641 - protein, 411 aa, Artificial Sequence; identical to SEQ ID NO: 2780
  Description of Artificial Sequence: Synthetic polypeptide

SEQ ID NO: 3642 - protein, 513 aa, Artificial Sequence; identical to SEQ ID NO: 3505
  Description of Artificial Sequence: Synthetic polypeptide

SEQ ID NO: 3643 - protein, 512 aa, Artificial Sequence; identical to SEQ ID NO: 2392
  Description of Artificial Sequence: Synthetic polypeptide

SEQ ID NO: 3644 - protein, 592 aa, Artificial Sequence; identical to SEQ ID NO: 3506
  Description of Artificial Sequence: Synthetic polypeptide

SEQ ID NO: 3645 - protein, 540 aa, Artificial Sequence; identical to SEQ ID NO: 3507
  Description of Artificial Sequence: Synthetic polypeptide

SEQ ID NO: 3646 - protein, 452 aa, Artificial Sequence; identical to SEQ ID NO: 2712
  Description of Artificial Sequence: Synthetic polypeptide

SEQ ID NO: 3647 - protein, 447 aa, Artificial Sequence; identical to SEQ ID NO: 3508
  Description of Artificial Sequence: Synthetic polypeptide

SEQ ID NO: 3648 - protein, 500 aa, Artificial Sequence; identical to SEQ ID NO: 3509
  Description of Artificial Sequence: Synthetic polypeptide

SEQ ID NO: 3649 - protein, 460 aa, Artificial Sequence; identical to SEQ ID NO: 3510
  Description of Artificial Sequence: Synthetic polypeptide

SEQ ID NO: 3650 - protein, 463 aa, Artificial Sequence; identical to SEQ ID NO: 3511
  Description of Artificial Sequence: Synthetic polypeptide

SEQ ID NO: 3651 - protein, 582 aa, Artificial Sequence; identical to SEQ ID NO: 3512
  Description of Artificial Sequence: Synthetic polypeptide

SEQ ID NO: 3652 - protein, 519 aa, Artificial Sequence; identical to SEQ ID NO: 3513
  Description of Artificial Sequence: Synthetic polypeptide

SEQ ID NO: 3653 - protein, 547 aa, Artificial Sequence; identical to SEQ ID NO: 2292
  Description of Artificial Sequence: Synthetic polypeptide

SEQ ID NO: 3654 - protein, 500 aa, Artificial Sequence; identical to SEQ ID NO: 2453
  Description of Artificial Sequence: Synthetic polypeptide

SEQ ID NO: 3655 - protein, 463 aa, Artificial Sequence; identical to SEQ ID NO: 3514
  Description of Artificial Sequence: Synthetic polypeptide

SEQ ID NO: 3656 - protein, 509 aa, Artificial Sequence; identical to SEQ ID NO: 3515
  Description of Artificial Sequence: Synthetic polypeptide

SEQ ID NO: 3657 - protein, 474 aa, Artificial Sequence; identical to SEQ ID NO: 3516
  Description of Artificial Sequence: Synthetic polypeptide

SEQ ID NO: 3658 - protein, 464 aa, Artificial Sequence; identical to SEQ ID NO: 3517
  Description of Artificial Sequence: Synthetic polypeptide

SEQ ID NO: 3659 - protein, 452 aa, Artificial Sequence; identical to SEQ ID NO: 3518
  Description of Artificial Sequence: Synthetic polypeptide

SEQ ID NO: 3660 - protein, 452 aa, Artificial Sequence; identical to SEQ ID NO: 3519
  Description of Artificial Sequence: Synthetic polypeptide

SEQ ID NO: 3661 - protein, 465 aa, Artificial Sequence; identical to SEQ ID NO: 2668
  Description of Artificial Sequence: Synthetic polypeptide

SEQ ID NO: 3662 - protein, 470 aa, Artificial Sequence; identical to SEQ ID NO: 3520
  Description of Artificial Sequence: Synthetic polypeptide

SEQ ID NO: 3663 - protein, 452 aa, Artificial Sequence; identical to SEQ ID NO: 3521
  Description of Artificial Sequence: Synthetic polypeptide

SEQ ID NO: 3664 - protein, 504 aa, Artificial Sequence; identical to SEQ ID NO: 3522
  Description of Artificial Sequence: Synthetic polypeptide

SEQ ID NO: 3665 - protein, 545 aa, Artificial Sequence; identical to SEQ ID NO: 3523
  Description of Artificial Sequence: Synthetic polypeptide

SEQ ID NO: 3666 - protein, 461 aa, Artificial Sequence; identical to SEQ ID NO: 2691
  Description of Artificial Sequence: Synthetic polypeptide

SEQ ID NO: 3667 - protein, 471 aa, Artificial Sequence; identical to SEQ ID NO: 3524
  Description of Artificial Sequence: Synthetic polypeptide

SEQ ID NO: 3668 - protein, 580 aa, Artificial Sequence; identical to SEQ ID NO: 3525
  Description of Artificial Sequence: Synthetic polypeptide

SEQ ID NO: 3669 - protein, 516 aa, Artificial Sequence; identical to SEQ ID NO: 3526
  Description of Artificial Sequence: Synthetic polypeptide

SEQ ID NO: 3670 - protein, 515 aa, Artificial Sequence; identical to SEQ ID NO: 3527
  Description of Artificial Sequence: Synthetic polypeptide

SEQ ID NO: 3671 - protein, 471 aa, Artificial Sequence; identical to SEQ ID NO: 2649
  Description of Artificial Sequence: Synthetic polypeptide

SEQ ID NO: 3672 - protein, 485 aa, Artificial Sequence; identical to SEQ ID NO: 3528
  Description of Artificial Sequence: Synthetic polypeptide

SEQ ID NO: 3673 - protein, 475 aa, Artificial Sequence; identical to SEQ ID NO: 3529
  Description of Artificial Sequence: Synthetic polypeptide

SEQ ID NO: 3674 - protein, 473 aa, Artificial Sequence; identical to SEQ ID NO: 2634
  Description of Artificial Sequence: Synthetic polypeptide

SEQ ID NO: 3675 - protein, 485 aa, Artificial Sequence; identical to SEQ ID NO: 2565
  Description of Artificial Sequence: Synthetic polypeptide

SEQ ID NO: 3676 - protein, 477 aa, Artificial Sequence; identical to SEQ ID NO: 2623
  Description of Artificial Sequence: Synthetic polypeptide

SEQ ID NO: 3677 - protein, 461 aa, Artificial Sequence; identical to SEQ ID NO: 3530
  Description of Artificial Sequence: Synthetic polypeptide

SEQ ID NO: 3678 - protein, 460 aa, Artificial Sequence; identical to SEQ ID NO: 3531
  Description of Artificial Sequence: Synthetic polypeptide

SEQ ID NO: 3679 - protein, 458 aa, Artificial Sequence; identical to SEQ ID NO: 2699
  Description of Artificial Sequence: Synthetic polypeptide

SEQ ID NO: 3680 - protein, 462 aa, Artificial Sequence; identical to SEQ ID NO: 3532
  Description of Artificial Sequence: Synthetic polypeptide

SEQ ID NO: 3681 - protein, 545 aa, Artificial Sequence; identical to SEQ ID NO: 3533
  Description of Artificial Sequence: Synthetic polypeptide

SEQ ID NO: 3682 - protein, 481 aa, Artificial Sequence; identical to SEQ ID NO: 2594
  Description of Artificial Sequence: Synthetic polypeptide

SEQ ID NO: 3683 - protein, 552 aa, Artificial Sequence
  Description of Artificial Sequence: Synthetic polypeptide
MPGMTTETGPDPAGLIDLFCRKSKAVKSRANGAGQRRKQEISIAAQETLGRKVAALLGMQVRHVWKEVGSASRFRKGKARDDQSKALKALESGEVGALWCYRLDRWDRGGAGAILKIIEPEDGMPRRLLFGWDEDTGRPVLDSTNKRDRGELIRRAEEAREEAEKLSERVRDTKAHQRENGEWVNARAPYGLRVVLVTVSDEEGDEYDERKLAADDEDAGGPDGLTKAEAARLVFTLPVTDRLSYAGTAHAMNTREIPSPTGGPWIAVTVRDMIQNPAYAGWQTTGRQDGKQRRLTFYNGEGKRVSVMHGPPLVTDEEQEAAKAAVKGEDGVGVPLDGSDHDTRRKHLLSGRMRCPGCGGSCSYSGNGYRCWRSSVKGGCPAPTYVARKSVEEYVAFRWAAKLAASEPDDPFVIAVADRWAALTHPQASEDEKYAKAAVREAEKNLGRLLRDRQNGVYDGPAEQFFAPAYQEALSTLQAAKDAVSESSASAAVDVSWIVDSSDYEELWLRATPTMRNAIIDTCIDEIWVAKGQRGRPFDGDERVKIKWAART

SEQ ID NO: 3684 - DNA, 47 bp, Streptomyces virus TG1
gatcagctccgcgggcaagacctttctccttcacggggtggaaggtc

SEQ ID NO: 3685 - DNA, 45 bp, Streptomyces virus phiC31
tgcgggtgccagggcgtgcccttgggctccccgggcgcgtactcc

SEQ ID NO: 3686 - DNA, 34 bp, Streptomyces virus phiBT1
caggtttttgacgaaagtgatccagatgatccag

SEQ ID NO: 3687 - DNA, 53 bp, Unknown
  Description of Unknown: Streptomyces phage SV1
catcagggcggtcaggccgtagatgtggaagaaacggcagcacggcgaggacg

SEQ ID NO: 3688 - DNA, 50 bp, Unknown
  Description of Unknown: Streptomyces phage Joe
atctggatgtgggtgtccatctgcgggcagacgccgcagtcgaagcacgg

SEQ ID NO: 3689 - DNA, 42 bp, Mycobacterium virus Bxz2
cggtctccatcgggatctgctgatcgagcagcatgccgacca

SEQ ID NO: 3690 - DNA, 42 bp, Mycobacterium virus Peaches; identical to SEQ ID NO: 3689

SEQ ID NO: 3691 - DNA, 38 bp, Mycobacterium virus Bxb1
ggcttgtcgacgacggcggtctccgtcgtcaggatcat

SEQ ID NO: 3692 - DNA, 53 bp, Unknown
  Description of Unknown: Lactococcus phage TP901-1
atgccaacacaattaacatctcaatcaaggtaaatgctttttgctttttttgc

SEQ ID NO: 3693 - DNA, 64 bp, Unknown
  Description of Unknown: Streptomyces phage R4
gcatgttccccaaagcgataccacttgaagcagtggtactgcttgtgggtacactctgcgggtg

SEQ ID NO: 3694 - DNA, 42 bp, Unknown
  Description of Unknown: Enterococcus phage EFC-1
caaaggatcactgaatcaaaagtattgctcatccacgcgaaa

SEQ ID NO: 3695 - DNA, 62 bp, Unknown
  Description of Unknown: Streptococcus phage phi-m46.1
gtagatttgtttccccagacgcacacgtggagtgtgtaagtttacttgagaaacggagttaa

SEQ ID NO: 3696 - DNA, 40 bp, Unknown
  Description of Unknown: Listeria phage A118
tttcggatcaagctatgaaggacgcaaagagggaactaaa

SEQ ID NO: 3697 - DNA, 62 bp, Unknown
  Description of Unknown: Lactobacillus phage LR1
aagtgtccaagctggcccccgatcccagtttcaatagtttggggaatctttgtaagtggtaa

SEQ ID NO: 3698 - DNA, 58 bp, Bacillus subtilis
cacccattgtgttcacaggagatacagctttatctgtactgatattaatgacatgctg

SEQ ID NO: 3699 - DNA, 71 bp, Bacillus virus Wbeta
cggaaggtagcgtcaacgataggtgtaactgtcgtgtttgtaacggtacttccaacagctggcgccgccac

SEQ ID NO: 3700 - DNA, 62 bp, Streptococcus suis
cttccagcacatcacccacatggtctgtgtcggtgtgcgtcagcactagactatcaatccta

SEQ ID NO: 3701 - DNA, 61 bp, Bacillus amyloliquefaciens
ttttttccgcctgtcgtaaccggatctgttgtaacgattatcggaatgaccttgatgccgg

SEQ ID NO: 3702 - DNA, 61 bp, Staphylococcus epidermidis
acttccaattaacccttcaccagccctataccaagttcctgtcgcgcatcctccagctaat

SEQ ID NO: 3703 - DNA, 62 bp, Clostridium botulinum
actacttaatatatccataagagaaatttcatttccttctttgtctacccctataggatctt

SEQ ID NO: 3704 - DNA, 62 bp, Clostridium botulinum
acgaaataaaagattgtatagatgctggtaggaaacatgcccttgtcatttagctgaaacag

SEQ ID NO: 3705 - DNA, 61 bp, Clostridium difficile
tattctaagtaatgtagttttaccacatccactaggtccgagtaaacatagaaattcccct

SEQ ID NO: 3706 - DNA, 65 bp, Clostridium botulinum
atggattttgcagattcccagatgcccctacagaaagaggtacaaaacatttattggaattaatt

SEQ ID NO: 3707 - DNA, 66 bp, Staphylococcus lugdunensis
gttcgtggtaactatgggtggtacaggtgccacattagttgtaccatttatgtttatgtggttaac

SEQ ID NO: 3708 - DNA, 61 bp, Geobacillus thermoglucosidasius
caagaaacgttccgtctgtttgtgtcagctgcgcgaaattaatgaccggatcgtttgttcc

SEQ ID NO: 3709 - DNA, 62 bp, Rhodobacter sphaeroides
ggaactccgccgggcccatctggtcgaagaagatgaaggggcccaccatctgcctccgggcc

SEQ ID NO: 3710 - DNA, 62 bp, Burkholderia multivorans
gatacggatgttcgtcgccggcacgctggtcacgctcggcaatcccaagatcatgctgttct

SEQ ID NO: 3711 - DNA, 40 bp, Mycobacterium tuberculosis
gaaggtgttggtgcggggttggccgtggtcgaggtggggt

SEQ ID NO: 3712 - DNA, 59 bp, Streptomyces scabiei
ggacggcgcagaaggggagtagctcttcgccggaccgtcgacatactgctcagctcgtc

SEQ ID NO: 3713 - DNA, 64 bp, Bacillus cytotoxicus
gcatacattgttgttgtttttccagatccagttggtcctgtaaatataagcaatccatgtgagt

SEQ ID NO: 3714 - DNA, 52 bp, Listeria innocua
taactttttcggatcgagttatgatggacgtaaagagggaacaaagcatcta

SEQ ID NO: 3715 - DNA, 40 bp, Unknown; identical to SEQ ID NO: 3696
  Description of Unknown: Shuttle integration vector pPL1

SEQ ID NO: 3716 - DNA, 32 bp, Unknown
  Description of Unknown: Brochothrix phage BL3
tttccacagacaactcacgtggaggtagtcac

SEQ ID NO: 3717 - DNA, 62 bp, Enterococcus faecalis
ttctggaccatgatgcgccacttccgaaatttcaaaaagatcagtggtcaaacggctcatta

SEQ ID NO: 3718 - DNA, 62 bp, Listeria monocytogenes
ctgtaactttttcggatcaagctatgagggacgcaaagagggaactaaacacttaattggtg

SEQ ID NO: 3719 - DNA, 61 bp, Clostridium botulinum
tattcaattatgtgtcgtaatttttatctattgcgacgaaaaaacaccataaaattctaac

SEQ ID NO: 3720 - DNA, 61 bp, Clostridium botulinum
agaaatagacctttcaactggacaaggtgctgataaaactatgcagcaagtcttaagtaaa

SEQ ID NO: 3721 - DNA, 65 bp, Staphylococcus aureus
tttatattgcgaaaaataattggcgaacgaggtaactggatacctcatccgccaattaaaatttg

SEQ ID NO: 3722 - DNA, 62 bp, Listeria innocua
ttattgcaagaaaaatgggttataagtacacatcaggttatagtaatatcgaaaaaggaagc

SEQ ID NO: 3723 - DNA, 62 bp, Rhodococcus jostii
atcgcgcagaacggtgcggtgatcagtgagtacgcaccgggcacgacaccggcgaagcatcg

SEQ ID NO: 3724 - DNA, 62 bp, Bacillus cereus
gtaatatgtttggatatggggaagtgaatcagtacaaccgccacagtaccctcatgtcagcc

SEQ ID NO: 3725 - DNA, 62 bp, Bacillus weihenstephanensis
tttgtagccattaggcgcattaggttgacgccattaagccctaaagcatcattcgtcgaaac

SEQ ID NO: 3726 - DNA, 62 bp, Unknown
  Description of Unknown: Streptococcus phage 370.1
gtttgtaaaggagactgataatggcatgtacaactatactcgtcggtaaaaaggcatcttat

SEQ ID NO: 3727 - DNA, 62 bp, Lactococcus lactis
aatactaataatagctagtacaattaacatctctatcaaagtaaaagcttttagctctttct

SEQ ID NO: 3728 - DNA, 62 bp, Streptococcus pneumoniae
tctggtgtagacgttaaacgtccaatcaagataactttattatacatattttcttcctccta

SEQ ID NO: 3729 - DNA, 63 bp, Streptococcus mitis
taggaggaaaaaatatgtataataaagttatcatgattgggcgtttgacgtctacaccagaat

SEQ ID NO: 3730 - DNA, 66 bp, Streptococcus equi
ttccaaagagcgcccaacgcgacctgaaatttgaataagactgctgcttgtgtaaaggcgatgatt

SEQ ID NO: 3731 - DNA, 65 bp, Staphylococcus haemolyticus
caatcatcagataactatggcggcacgtgcattaaccacggttgtatcccgtctaaagtactcgt

SEQ ID NO: 3732 - DNA, 64 bp, Staphylococcus lugdunensis
aatctgcaaacatgtatggcggtacatgtatcaacattggttgtattcctacaaagacactcat

SEQ ID NO: 3733 - DNA, 56 bp, Staphylococcus virus phiMR11
cgaaaatgtatggaggcacttgtatcaatataggatgtataccttcgaagacactt

SEQ ID NO: 3734 - DNA, 62 bp, Geobacillus sp.
agacgagaaacgttccgtccgtctgggtcagttgggcaaagttgatgaccgggtcgtccgtt

SEQ ID NO: 3735 - DNA, 62 bp, Streptococcus pneumoniae
agcacgctgataatcagcaagaccaccaacatttccaccaatgtaaaagctttaaccttagc

SEQ ID NO: 3736 - DNA, 61 bp, Unknown
  Description of Unknown: Streptomyces phage phiK38-1
gagcgccggatcagggagtggacggcctgggagcgctacacgctgtggctgcggtcggtgc

SEQ ID NO: 3737 - DNA, 46 bp, Streptomyces virus TG1
tccagcccaacagtgttagtctttgctcttacccagttgggcggga

SEQ ID NO: 3738 - DNA, 42 bp, Streptomyces virus phiC31
gtgccccaactggggtaacctttgagttctctcagttggggg

SEQ ID NO: 3739 - DNA, 52 bp, Streptomyces virus phiBT1
ggtgctgggttgttgtctctggacagtgatccatgggaaactactcagcacc

SEQ ID NO: 3740 - DNA, 52 bp, Unknown
  Description of Unknown: Streptomyces phage SV1
atgtggtcctttagatccactgacgtgggtcagtgtctctaaaggactcgcg

SEQ ID NO: 3741 - DNA, 47 bp, Unknown
  Description of Unknown: Streptomyces phage Joe
agttgtggccatgtgtccatctgggggcagatggagacggggtcaca

SEQ ID NO: 3742 - DNA, 52 bp, Mycobacterium virus Bxz2
taaccgcaagtgtacatccctcggctggccgagacaagtacagttgcgacag

SEQ ID NO: 3743 - DNA, 52 bp, Mycobacterium virus Peaches
tagtttccaatgttacaggaactgctggcagaatccaacacattggaagtcg

SEQ ID NO: 3744 - DNA, 48 bp, Mycobacterium virus Bxb1
ggtttgtctggtcaaccaccgcggtctcagtggtgtacggtacaaacc

SEQ ID NO: 3745 - DNA, 53 bp, Unknown
  Description of Unknown: Lactococcus phage TP901-1
gagtttttatttcgtttatttcaattaaggtaactaaaaaactccttttaagg

SEQ ID NO: 3746 - DNA, 50 bp, Unknown
  Description of Unknown: Streptomyces phage R4
tgttccccaaagcgataccacttgaagcagtggtactgcttgtgggtaca

SEQ ID NO: 3747 - DNA, 54 bp, Unknown
  Description of Unknown: Enterococcus phage EFC-1
attttaggtatatgattttgtttattagtgtaaataacactatgtacctaaaat

SEQ ID NO: 3748 - DNA, 62 bp, Unknown
  Description of Unknown: Streptococcus phage phi-m46.1
tattagtatagaagaaagctctcagcacacgtggagtgtgttgctctctgctcgtaaagcct

SEQ ID NO: 3749 - DNA, 40 bp, Unknown
  Description of Unknown: Listeria phage A118
ttcctcgttttctctcgttggaagaagaagaaacgagaaa

SEQ ID NO: 3750 - DNA, 62 bp, Unknown
  Description of Unknown: Lactobacillus phage LR1
tataatttcgtatattagatataaccggtttcaattggaaatacctaatatacgaaaaaagg

SEQ ID NO: 3751 - DNA, 56 bp, Bacillus subtilis
tgtagtaagtatcttaatatacagctttatctgttttttaagatacttactacttt

SEQ ID NO: 3752 - DNA, 63 bp, Bacillus virus Wbeta
ctagttttaaagttggttattagttactgtgatatttatcacggtacccaataaccaatgaat

SEQ ID NO: 3753 - DNA, 62 bp, Streptococcus suis
ggtattgtatcaatttcagaactcacacttcggtatgcgtactcaatttgatacaattacaa

SEQ ID NO: 3754 - DNA, 62 bp, Bacillus amyloliquefaciens
cttttttgttgtacttaaacaataatgcttgtaagaattattgattgagtacgacataaacc

SEQ ID NO: 3755 - DNA, 61 bp, Staphylococcus epidermidis
ttatatttcgacttaattaagtacagttccacctagagatagactaaataaagtattatta

SEQ ID NO: 3756 - DNA, 62 bp, Clostridium botulinum
gttaggtgtatatcatacctaacgcaattcattacatcacatatgttatacacctactttaa

SEQ ID NO: 3757 - DNA, 62 bp, Clostridium botulinum
aaaagaatccaaattatcgtactttaacatagtgaatactgtccatcatgtataaaagtacg

SEQ ID NO: 3758 - DNA, 64 bp, Clostridium difficile
tatataattatttggactaacatatagtatccacttggctattattagttagtccaaataaata

SEQ ID NO: 3759 - DNA, 65 bp, Clostridium botulinum
gtttatatgtttactaataagacgctctcaacccataaagtcttattagtaaacatatttcaact

SEQ ID NO: 3760 - DNA, 65 bp, Staphylococcus lugdunensis
tttttgtatgttagttgtgtcactgggtagacctaaatagtgacacaactgctattaaaatttaa

SEQ ID NO: 3761 - DNA, 62 bp, Geobacillus thermoglucosidasius
ttataaacctgttttaaagttaactttacatgcctaacattaactcttatacaggttaaggt

SEQ ID NO: 3762 - DNA, 62 bp, Rhodobacter sphaeroides
atggggtcacaataccaatcatgttcaagaatgtgaagggtattttacccttgtcgtttcag

SEQ ID NO: 3763 - DNA, 62 bp, Burkholderia multivorans
agttgtctgataatatattttcggacacgctcggcaacccgaacgagagtcaaaatacattt

SEQ ID NO: 3764 - DNA, 52 bp, Mycobacterium tuberculosis
gtagtgtatctcacaggtccacggttggccgtggactgctgaagaacattcc

SEQ ID NO: 3765 - DNA, 63 bp, Streptomyces scabiei
gctcatgtatgtgtctacgcgagattctcgcccgagaacttctgcaaggcactgctcttggct

SEQ ID NO: 3766 - DNA, 64 bp, Bacillus cytotoxicus
caataacggttgtatttgtagaacttgaccagttgttttagtaacataaatacaactccgaata

SEQ ID NO: 3767 - DNA, 52 bp, Listeria innocua
gtttagtatctcgttatctctcgttggagggagaagaaacgggataccaaaa

SEQ ID NO: 3768 - DNA, 40 bp, Unknown
  Description of Unknown: Shuttle integration vector pPL1
ttcctcgttttctctcgttggacggaaacgaatcgagaaa

SEQ ID NO: 3769 - DNA, 33 bp, Unknown
  Description of Unknown: Brochothrix phage BL3
caatgaaaaactaggcatgtagaagttgtttgt

SEQ ID NO: 3770 - DNA, 62 bp, Enterococcus faecalis
gtatcttgatgtacaacattactctttattttcaaatacagaataatgttgcatataatatt

SEQ ID NO: 3771 - DNA, 62 bp, Listeria monocytogenes
ttgtttagtccctcgttttctctcgttggacggagacgaatcgagaaactaaaattataaat

SEQ ID NO: 3772 - DNA, 62 bp, Clostridium botulinum
tatatacttatagatactaaatatttttgtattgcgtaacttcttctacacctgtaatatct

SEQ ID NO: 3773 - DNA, 62 bp, Clostridium botulinum
aaatataacctgtgtattgaaacaaggtgctgataaaaccctttcataaacacaagtaaata

SEQ ID NO: 3774 - DNA, 62 bp, Staphylococcus aureus
gtggttgtttttgttggaagtgtgtatcaggtatctgcatagttattccgaacttccaatta

SEQ ID NO: 3775 - DNA, 62 bp, Listeria innocua
ttatataaaatagtgtttttgtaaagtacacatcaccatatttgacaaaaaacctataaata

SEQ ID NO: 3776 - DNA, 59 bp, Rhodococcus jostii
ctatgtggtggtaatagcgagtaggggactactcgctccaggtacattaacaccatgga

SEQ ID NO: 3777 - DNA, 62 bp, Bacillus cereus
ataatagtgtatatggtagagaattaaaccagtttaatactccaccatgtacacgcagtgag

SEQ ID NO: 3778 - DNA, 62 bp, Bacillus weihenstephanensis
cgtcaccttgttggcgtaattagatttactccaacagggtgatgacaaagctaatgaatttt

SEQ ID NO: 3779 - DNA, 65 bp, Unknown
  Description of Unknown: Streptococcus phage 370.1
atggataaaaaaatacagcgtttttcatgtacaactatactagttgtagtgcctaaataatgctt

SEQ ID NO: 3780 - DNA, 60 bp, Lactococcus lactis
cgcttaattgcgagtttttatttcgcttatctcaattaaggtaactaaaaaactcctttt

SEQ ID NO: 3781 - DNA, 62 bp, Streptococcus pneumoniae
tatttctgtattttagtcaaagtaattaagataagttagagttagtaacagtattttaactt

SEQ ID NO: 3782 - DNA, 61 bp, Streptococcus mitis
gttaataatatgtatttaagtctaacttatcatgacaaatttgactaaaatacaaaaaggc

SEQ ID NO: 3783 - DNA, 62 bp, Streptococcus equi
aaaaattacaaagttttcaacccttgatttgaattagcggtcaaataatttgtaattcgttt

SEQ ID NO: 3784 - DNA, 64 bp, Staphylococcus haemolyticus
ttaataaactatggaagtatgtacagtcttgcaatgttgagtgaacaaacttccataataaaat

SEQ ID NO: 3785 - DNA, 61 bp, Staphylococcus lugdunensis
atttttgtacggaagtagatactatctttcaatatccatgttacttagtgccatacaaaaa

SEQ ID NO: 3786 - DNA, 55 bp, Staphylococcus virus phiMR11
tttgtgcggaactacgaacagttcattaatacgaagtgtacaaacttccatacaa

SEQ ID NO: 3787 - DNA, 66 bp, Geobacillus sp.
gtgttataaacctgtgtgagagttaagtttacatgcctaaccttaacttttacgcaggttcagctt

SEQ ID NO: 3788 - DNA, 62 bp, Streptococcus pneumoniae
ggaaaatataaataattttagtaacctacatctcaatcaaggatagtaaaactctcactctt

SEQ ID NO: 3789 - DNA, 60 bp, Unknown
  Description of Unknown: Streptomyces phage phiK38-1
ccctaatacgcaagtcgataactctcctgggagcgttgacaacttgcgcaccctgatctg

SEQ ID NO: 3790 - RNA, 21 nt, Homo sapiens
cauaaaguagaaagcacuacu

SEQ ID NO: 3791 - RNA, 23 nt, Homo sapiens
uguaguguuuccuacuuuaugga

SEQ ID NO: 3792 - RNA, 24 nt, Homo sapiens
uuuggcaaugguagaacucacacu

SEQ ID NO: 3793 - RNA, 21 nt, Homo sapiens
ugguucuagacuugccaacua

SEQ ID NO: 3794 - RNA, 22 nt, Homo sapiens
uauggcacugguagaauucacu

SEQ ID NO: 3795 - RNA, 22 nt, Homo sapiens
gugaauuaccgaagggccauaa

SEQ ID NO: 3796-3799 - skipped (4 entries)

SEQ ID NO: 3800 - DNA, 260 bp, Artificial Sequence
  Description of Artificial Sequence: Synthetic polynucleotide
tcaaaggttgatgttactgctgataatgtagatatcatatttaaattccaactcgcttaattgcgagtttttatttcgtttatttcaattaaggtaactaaaaaactccttttaaggagtttctgtaatcaattaatttcttcaatatattttatttggtcccatagttcatcagttatctcatgcatagaaggtttttgttttgtttgtattagatatcctttctccttaagcatgttaactactttctttagtttctg

SEQ ID NO: 3801 - DNA, 260 bp, Artificial Sequence
  Description of Artificial Sequence: Synthetic polynucleotide
ttaattaaaaaaatagacgtatggaacgataataaaattaagatccactggaatatttaattttttaggcgctttacgccttttttcgtatattaggtatttccaattgaaaccggttatatctaatatacgaaattatacaacaaaaagccccagtgaccattgcataatctgcaacaaccactagggctaaatttttattgacgttgtgagtaaacaactgaattgagttgctgttggttaacaccattggcaatatc

1. A system for modifying DNA comprising:
a) a recombinase polypeptide comprising an amino acid sequence of Table 3A, 3B, or 3C, or an amino acid sequence having at least 70% identity thereto, or a nucleic acid encoding the recombinase polypeptide; and
b) a double-stranded insert DNA comprising:
(i) a DNA recognition sequence that binds to the recombinase polypeptide of (a),
said DNA recognition sequence having a first parapalindromic sequence and a second parapalindromic sequence, wherein each parapalindromic sequence is about 15-35 or 20-30 nucleotides, and the first and second parapalindromic sequences together comprise a parapalindromic region occurring within a nucleotide sequence in the LeftRegion or RightRegion columns of Table 2A, 2B, or 2C, or a nucleotide sequence having at least 70% identity to said parapalindromic region, or having no more than 20 sequence alterations relative thereto, and
said DNA recognition sequence further comprises a core sequence of about 2-20 nucleotides wherein the core sequence is situated between the first and second parapalindromic sequences, and
(ii) a heterologous object sequence.

2. A eukaryotic cell comprising: a recombinase polypeptide comprising an amino acid sequence of Table 3A, 3B, or 3C, or an amino acid sequence having at least 70% identity thereto, or a nucleic acid encoding the recombinase polypeptide.

3. A eukaryotic cell comprising:
(i) a DNA recognition sequence, said DNA recognition sequence comprising a first parapalindromic sequence and a second parapalindromic sequence,
wherein each parapalindromic sequence is about 15-35 or 20-30 nucleotides, and the first and second parapalindromic sequences together comprise a parapalindromic region occurring within a nucleotide sequence in the LeftRegion or RightRegion columns of Table 2A, 2B, or 2C, or a nucleotide sequence having at least 70% identity to said parapalindromic region, or having no more than 20 sequence alterations relative thereto,
wherein said DNA recognition sequence further comprises a core sequence of about 2-20 nucleotides wherein the core sequence is situated between the first and second parapalindromic sequences; and
(ii) a heterologous object sequence.

4. A method of modifying the genome of a eukaryotic cell comprising contacting the cell with a system according to claim 1,
thereby modifying the genome of the eukaryotic cell.

5. A method of inserting a heterologous object sequence into the genome of a eukaryotic cell comprising contacting the cell with a system according to claim 1,
thereby inserting the heterologous object sequence into the genome of the eukaryotic cell.

6-10. (canceled)

11. The system of claim 1, wherein (a) and (b) are in separate containers.

12. The system of claim 1, wherein (a) and (b) are admixed.

13. The system of claim 1, wherein the first and second parapalindromic sequences comprise 1 non-palindromic position.

14. The system of claim 1, wherein the nucleic acid encoding the recombinase polypeptide is in a viral vector.

15. The system of claim 14, wherein the viral vector comprises an AAV vector.

16. The system of claim 1, wherein the double-stranded insert DNA is in a viral vector.

17. The system of claim 1, wherein the nucleic acid encoding the recombinase polypeptide is an mRNA.

18. The method of claim 4, wherein the heterologous object sequence is inserted into the genome of the cell at an efficiency of at least about 0.1%.

19. The method of claim 4, wherein, in a population of the cells, the heterologous object sequence is inserted into between 1-10 sites within the genome of the cell.

20. The method of claim 4, wherein the cell is a human cell.
